(19) United States
(12) Patent Application Publication
(10) Pub. No.: US 2022/0273759 A1
(43) Pub. Date: Sep. 1, 2022

(54) PHARMACEUTICAL ASSOCIATION FOR CONVERTING A NEOPLASTIC CELL INTO A NON-NEOPLASTIC CELL AND USES THEREOF

(71) Applicant: HISTIDE AG, Schindellegi (CH)

(72) Inventors: Omar F. ZOUANI, Einsiedeln (CH); Veronika GOCHEVA, Einsiedeln (CH)

(21) Appl. No.: 17/571,283

(22) Filed: Jan. 7, 2022

Related U.S. Application Data
(63) Continuation of application No. 15/760,838, filed on Mar. 16, 2018, now abandoned.
(60) Provisional application No. 62/219,716, filed on Sep. 17, 2015.

(51) Int. Cl. A61K 38/12; A61P 35/00; G16B 15/00; G01N 33/50; A61K 38/08; G16B 15/30

(52) U.S. Cl. CPC A61K 38/12; A61P 35/00; G16B 15/00; G01N 33/5017; A61K 38/08; G16B 15/30; C07K 2299/00

(57) ABSTRACT

The present disclosure provides a pharmaceutical association for use in the treatment, prevention and/or diagnostic of a neoplastic disease, said association comprising at least one growth factor receptor-binding compound, which activates at least one growth factor receptor of a neoplastic cell, and at least one bioactive carrier forming at least one covalent or non-covalent interaction with said at least one growth factor receptor-binding compound, and wherein said association reduces or suppresses, in the neoplastic cell, the gene expression of at least one cyclin D and/or reduces or suppresses the formation of at least one complex formed between said at least one cyclin D and at least one of cyclin dependent-kinase 4 or 6.

### CROSS-REFERENCE TO RELATED APPLICATIONS

[0001] This application is a continuation of U.S. application Ser. No. 15/760,838 filed 16 Mar. 2018, which is a U.S. National Stage application of International Application No. PCT/EP2016/071785 filed 15 Sep. 2016, which claims priority to U.S. Provisional Application No. 62/219,716 filed 17 Sep. 2015, the entire disclosures of which are hereby incorporated by reference in their entireties.

### SEQUENCE LISTING

[0002] The instant application contains a Sequence Listing which has been submitted electronically in ASCII format and is hereby incorporated by reference in its entirety. Said ASCII copy, created on 1 Sep. 2020, is named 2020-09-01_21US_replacement sequence listing and is 4,333,248 bytes in size.

### FIELD OF THE INVENTION

[0003] The invention relates to associations, combinations, compositions, kits, methods and processes for the design, preparation, manufacture and/or formulation thereof, and methods and uses thereof for converting or recoding a neoplastic cell into a non-neoplastic cell and treating and/or preventing a neoplastic disease.

### BACKGROUND

[0004] Neoplastic cells, such as cancer cells, are generally characterized by abnormal and/or uncontrolled proliferation leading, in most cases, to the development of a neoplastic disease, such as cancer. Conventional methods for treating neoplastic diseases include surgical treatments, radiotherapy and chemotherapy.

[0005] Surgery is usually practised in order to extract localised (non-circulating) neoplastic cells from a patient's body and is most generally combined with radiotherapy treatments. As well as being limited to the treatment of very early stage, non-metastatic tumors, surgery is an invasive medical procedure which remains traumatic for the treated patient, involves the permanent removal of tissues or organs (which is sometimes not possible as some organs or organ parts are not accessible or cannot be removed due to life threatening consequences), in some cases has been shown to “unblock” dormant tumors, while only offering a “visual” selectivity to distinguish between healthy and tumor cells. Radiotherapy also presents some significant drawbacks for the treated patients including the high cost of the radiation therapy equipment, the high cost of the treatment itself, side effects associated with the damage or destruction of healthy cells, limited effectiveness against metastasized neoplastic diseases, skin rashes caused by external beam radiation, the potential deleterious impact on the functioning of tissues, glands or organs located near the site of treatment, and the possible development of secondary cancers as a result of exposure to the radiations.

[0006] Conventional chemotherapy methods generally involve the administration of small synthetic regulatory molecules which inhibit specific intracellular target proteins thought to be responsible for the neoplastic phenotype of the cell. One example is the inhibition of tyrosine kinase signal transduction by small molecule inhibitors to regulate uncontrolled cell proliferation. Typical chemotherapy methods also include treatments wherein DNA is covalently altered by e.g. DNA strands crosslinking, or treatments wherein the polymerisation and depolymerisation of microtubules is enhanced prevented thus provoking apoptosis of the damaged cell.

[0007] Another method for treating neoplastic diseases includes gene therapy wherein a missing or defective gene is replaced with a functional, healthy copy, which is delivered to the target dysfunctional cells using a “vector.” Gene transfer therapy can be done outside the body (ex vivo) by extracting bone marrow or blood from the patient and growing the cells in a laboratory. The corrected copy of the gene is then introduced and allowed to penetrate the cells' DNA before being injected back into the body. Gene transfers can also be done directly inside the patient's body (in vivo). Gene therapy has been applied to a few specific cases of blood cancers (chronic lymphocytic leukemia (CLL), acute lymphocytic leukemia (ALL) and multiple myeloma) through a particular form thereof in which the genetically modified cells were not the neoplastic cells themselves but instead the immune T-cells. Modified T-cells could then target and destroy specific blood cells (neoplastic as well as healthy). The body of the patient is then able to produce healthy blood cells and eventually provide a treatment to certain blood cancer types. However, gene therapy is generally best suited for the treatment of diseases caused by a single defective gene, not neoplastic diseases, which often involve multiple defective genes. Overall, issues such as the correct integration of therapeutic DNA into the genome; the immune system response to the introduction of foreign DNA into the cell; the toxicity, immune and inflammatory responses; gene control and targeting issues of the vectors (usually viral) required to transport the DNA inside the cell; the difficulties associated with the treatment of multigene-associated neoplastic cells; the possibilities of inducing tumors if the DNA is integrated in the wrong place in the genome; and/or the significant cost usually involved with such a therapy, have greatly undermined the development of gene therapy.

[0008] Other intracellular therapies have been contemplated for the treatment of neoplastic diseases using, for instance, micro-ribonucleic acids (miRNAs) or small interfering ribonucleic acids (siRNA). Under these conditions, the neoplastic cell is generally forced to down-regulate or repress the expression of one or more specific target genes (e.g. oncogenes) thus inhibiting the expression of defective and/or defecting proteins (e.g. oncoproteins). One example is the repression of genes encoding key proteins in the proliferation of cancer cells such as vascular endothelial growth factor (VEGF) and kinesin spindle protein (KSP), thus controlling cancer proliferation.

[0009] Neoplastic diseases may also be treated using immunotherapy such as antibody therapies wherein the antibodies bind to a target antigen typically on the surface of the neoplastic cell. Cell surface receptors are common targets for antibody therapies and include the epidermal growth factor receptor, HER2, CD52, the vascular endothelial growth factor-A and CD30. Once bound to an antigen (e.g. a cancer antigen), antibodies can induce antibody-dependent cell-mediated cytotoxicity, activate the complement system, prevent a receptor interacting with its ligand or deliver a payload of chemotherapy or radiation, which may all lead to the induction of neoplastic cell death. For instance, Cetuximab (Erbitux) is a chimeric IgG1 monoclonal antibody that targets the extracellular domain of the epidermal growth factor receptor (EGFR). Once a ligand binds to the EGFR on the surface of the cell, signalling pathways are activated inside the cell that are associated with malignant characteristics such as cancer cell proliferation and invasion. Cetuximab competitively inhibits ligand binding, thereby preventing EGFR activation and subsequent cellular signalling. It also activates programmed cell death (apoptosis).

[0010] Other intracellular treatments such as messenger ribonucleic acids (mRNAs)-based therapies have also been used in the treatment of neoplastic disease wherein administration of mRNA material into a neoplastic cell causes the neoplastic cell e.g. to express specifically encoded antigens and causing the neoplastic cell to be eliminated by the host immune system.

[0011] Differentiation therapy is another technique which was developed on the concept that the acquisition of the malignant phenotype (such as neoplasia) in a cell is considered as a progressive de-differentiation or a defective differentiation of that cell. Thus, as e.g. tumor cell populations evolve to greater degrees of malignancy, they usually lose more and more differentiation markers. This led to the suggestion that it may be possible to treat cancer by inducing differentiation of cancer cells. However, some scientific reports have shown that the differentiation therapy does not in fact induce cancer cells differentiation but instead restrains their growth thus allowing the application of more conventional therapies (such as chemotherapy) to eradicate the malignant cells. Examples of differentiation therapy involve the forced (re-)expression of some specific micro-RNAs and thus rely on an intracellular action generally presenting the same drawbacks as in any other intracellular therapies such the siRNA and gene therapies.

[0012] A shortcoming of the medical therapies relying on previously reported methods of treatment are numerous and mainly resides in the incapacity of providing a sustainable therapeutic effect i.e. the treated cells are not healed but instead are either destroyed (e.g. through induced apoptosis) or their proliferation reduced or temporarily halted using a sustained administration of therapeutic molecules until, in most case scenarios, neoplastic cells are able to adapt themselves and render the therapy ineffective. Interrupting a known therapy will usually lead to resumption of the neoplastic cell state.

[0013] Other drawbacks associated with previously reported therapies are numerous. For example, they may be very invasive and traumatic for the patient; they may necessitate permanently removing neoplastic tissues or organs which may be in some cases not practicable or feasible (organs or organ parts not accessible) or not possible due to life-threatening consequences; they may not be applied to or have limited effectiveness against metastatic neoplastic cells; they may not possess the ability to remove or treat all neoplastic cell types (i.e. neoplastic cells having different invasiveness levels and/or of different lineage origins); they may potentially “unblock” dormant tumors; they are often expensive; they may damage or destroy healthy cells alongside neoplastic cells thereby causing adverse treatment side effects; they may cause skin rashes and skin sensitivity; they may not target cancer stem cells as these are not proliferating; they may have a mutagenic action even towards healthy cells; they may require sustained administration to maintain treatment therapeutic effects; they may display very high cytotoxicity; they may cause multi-drug resistance whereby a drug having an intracellular action is no longer imported inside the cancer cell or is systematically exported outside of the cell.

[0014] None of these previously known methods allows for the effective recoding of a neoplastic cell thus permitting conversion of a neoplastic cell into a non-neoplastic cell.

[0015] The present invention thus provides associations, combinations, compositions, kits, methods and processes for the design, preparation, manufacture and/or formulation thereof, and methods and uses thereof for converting a neoplastic cell into a non-neoplastic cell including converting or recoding the neoplastic cell to induce, provide and/or reintroduce self-recovery or self-healing capabilities thereto.

### BRIEF DESCRIPTION OF THE DRAWINGS

[0016] FIG. 1 is a representation of a fluorescence intensity of non-covalent pharmaceutical associations comprising GFR-binding compounds and type-I collagen or apatite ceramics bioactive carriers. The images represent surfaces non-covalently coated with GFR-binding compounds labeled with FITC.

[0017] FIG. 2 is (a) a representation of a fluorescence intensity of pharmaceutical associations comprising various GFR-binding compounds and type-I collagen immediately after association or 3, 7 and 10 days after association. The images represent surfaces non-covalently coated with GFR-binding compounds labeled with FITC, (b) a total fluorescence intensity quantification of GFR-binding compounds labeled with FITC associated with apatite ceramics after incubation in cell culture medium for the given indicated times (up to 10 days).

[0018] FIG. 3 is (a) a representation of a Quantitative Real Time PCR analysis of the expression of DMP-1, Sclerostin and RANK-L in neoplastic cells (osteosarcoma cells) cultured on a native bioactive carrier (control) and on a bioactive carrier covalently associated with various GFR-binding compounds after 24 hours of culture, (P<0.001), (b) a 3D representation of a neoplastic cell cultured on a native bioactive carrier (left-hand side) and on a bioactive carrier covalently associated with a GFR-binding compound (right-hand side).

[0019] FIG. 4 is a representation of Quantitative Real Time PCR analysis of the expression of MLC-1, GATA-4 and α-Sarcomeric actin in neoplastic cells (Rabdomiosarcoma cells) cultured on a native bioactive carrier (control) and on a bioactive carrier covalently associated with various GFR-binding compounds after 24 hours of culture, (P<0.005).

[0020] FIG. 5 is a representation of Quantitative Real Time PCR analysis of the expression of Sox-9, IBSP and Collagen-IV in neoplastic cells (chondrosarcoma cells) cultured on a native bioactive carrier (control) and on a bioactive carrier covalently associated with various GFR-binding compounds after 24 hours of culture, (P<0.001).

[0021] FIG. 6 is a representation of Quantitative Real Time PCR analysis of the expression of MMP-9, Vimentin and α-SMA in neoplastic cells (adenocarcinoma cells) cultured on a native bioactive carrier (control) and on a bioactive carrier covalently associated with various GFR-binding compounds after 24 hours of culture, (P<0.005).

[0022] FIG. 7 is (a) a diagram representing a relative quantification from western blot of the amount of p53 protein present in neoplastic cells (osteosarcoma cells) cultured on a native bioactive carrier (control) and on a bioactive carrier covalently associated with various GFR-binding compounds after 24 hours of culture, (b) a diagram representing a relative quantification from western blot of the extent of phosphorylation of the pRB protein present in neoplastic cells cultured on a native bioactive carrier (control) and on a bioactive carrier covalently associated with various GFR-binding compounds after 24 hours of culture.

[0023] FIG. 8 is diagrams representing a relative quantification from western blot of the extent of phosphorylation of the ERK protein (a) and of the Src kinase (b) present in neoplastic cells (osteosarcoma cells) cultured on a native bioactive carrier (control) and on a bioactive carrier covalently associated with various GFR-binding compounds after 24 hours of culture, (c) a diagram representing a relative quantification from western blot of the amount of PDK1 protein present in neoplastic cells cultured on a native bioactive carrier (control) and on a bioactive carrier covalently associated with various GFR-binding compounds after 24 hours of culture.

[0024] FIG. 9 is a representation of a Quantitative Real Time PCR analysis of the expression of Paxillin (a) and Vinculin (b) in neoplastic cells (osteosarcoma cells) cultured on a native bioactive carrier (control) and on a bioactive carrier covalently associated with various GFR-binding compounds after 24 hours of culture, (P<0.001).

[0025] FIG. 10 is a representation of a Quantitative Real Time PCR analysis of the expression of Cyclin D (average gene expression of Cyclin D1, D2 and D3) at different time intervals during 24 hours in neoplastic cells (osteosarcoma cells) cultured on a native bioactive carrier (control) and on a bioactive carrier covalently associated with various GFR-binding compounds.

[0026] FIG. 11 is a diagram representing the grafting or association density of various radiolabeled GFR-binding compounds covalently associated with a bioactive carrier using radioactivity quantification.

[0027] FIG. 12 is (a) a representation of a Quantitative Real Time PCR analysis of the expression of DMP-1, SCT and RANK-L in neoplastic cells (osteosarcoma cells) cultured on a native polymer scaffold (control) and on a polymer scaffold grafted with a mixture comprising a GFR-binding compound as defined in the present disclosure and a RGD peptide, after 24 hours of culture, (b) immunofluorescence staining of a representative neoplastic cell (osteosarcoma cells) cultured on a polymer scaffold grafted with a mixture comprising a GFR-binding compound as defined in the present disclosure (ID SEQ NO: 2) and a RGD peptide, after 24 hours of culture. The actin filaments were immunostained by using Alexa 488-phalloidin. The focal adhesions were represented by immunostaining with anti-vinculin. The nucleus was stained with DAPI and is represented by a circle in the center of the cell. Scale bar: 5 μm. (c) is a diagram representing the grafting density of a radiolabeled GFR-binding compound as defined in the present disclosure covalently grafted on a polymer scaffold and of a radiolabeled GFR-binding compound and a non-labeled RGD peptide both grafted on a polymer scaffold. The measurements were performed by using radioactivity quantification (no significant difference was observed). (d) Western Blot analysis of the expression of integrin subunits (α and β) in neoplastic cells cultured on a non-modified polymer scaffold, after 24 h of culture. (e) Immunofluorescence staining of a representative neoplastic cell (osteosarcoma cells) cultured in presence of different integrin subunits (α and β) couples (anti-α3β1, anti-αvβ3 and anti-α5β3).

[0028] FIG. 13 is (a) Western blot analysis of the expression integrin α3 and β1 before and after transduction with two independent integrin □3 and β1 shRNAs, which efficiently reduced endogenous integrin α3β1 protein levels. (b) Immunofluorescence visualization of a neoplastic cell (osteosarcoma cells) after silencing integrins α3β1 by using shRNAs, after 24 hours of culture on a polymer scaffold covalently grafted with RGD peptides. The silencing of these specific integrin proteins were shown to significantly reduce or suppress neoplastic cell adhesion on the RGD grafted polymers. The actin filaments were immunostained by using Alexa 488-phalloidin. The focal adhesions were represented by immunostaining with anti-vinculin. The nucleus was stained with DAPI and is represented by a circle in the center of the cell. Scale bar: 5 μm. (c) Immunofluorescence visualization of neoplastic cells cultured on a polymer scaffold covalently modified with a mixture comprising a GFR-binding compound as defined herein (SEQ ID NO: 2) and a RGD peptide, after 24 hours of culture. Scale bar: 500 μm. A magnification of one region (right, Scale bar: 50 μm) indicates that Spheroid-like structures of neoplastic cells become predominant in this case as a result of the RGD induced integrin engagement. The actin filaments were immunostained by using Alexa 488-phalloidin. The focal adhesions were represented by immunostaining with anti-vinculin. The nucleus was stained with DAPI and is represented by a circle in the center of the cell.

[0029] FIG. 14 is a screen shot of the Standard Protein Blast online software used in the RMSD calculation procedure.

### DETAILED DESCRIPTION

[0030] Neoplastic diseases start when a cell (or neoplastic cell) is somehow altered so that it multiplies out of control. Tumors and cancers are some examples of neoplastic diseases. A tumor is a mass composed of a cluster of such abnormal cells. Most cancers form tumors, but not all tumors are cancerous. Benign, or non-cancerous, tumors—such as freckles and moles—stop growing, do not spread to other parts of the body, and do not create new tumors. Malignant, or cancerous, tumors crowd out healthy cells, interfere with body functions, and draw nutrients from body tissues. Cancers continue to grow and spread by direct extension or through a process called metastasis, whereby the malignant cells travel through the lymphatic or blood vessels, eventually forming new tumors in other parts of the body.

[0031] The term “cancer” generally encompasses more than one hundred diseases affecting nearly every part of the body, and all are potentially life threatening. The major types of cancer are carcinoma, sarcoma, melanoma, lymphoma, and leukemia.

[0032] Carcinoma is a type of cancer that develops from epithelial cells. Specifically, a carcinoma is a cancer that begins in a tissue that lines the inner or outer surfaces of the body, and that generally arises from cells originating in the endodermal or ectodermal germ layer during embryogenesis.

[0033] Sarcoma is a cancer that arises from transformed cells of mesenchymal origin. Thus, malignant tumors made of cancerous bone, cartilage, fat, muscle, vascular or hematopoietic tissues are, by definition, considered sarcomas. This is in contrast to a malignant tumor originating from epithelial cells, which are termed carcinoma. Human sarcomas are quite rare. Common malignancies, such as breast, colon, and lung cancer, are almost always carcinoma.

[0034] Melanoma is a type of skin cancer, which forms from melanocytes (pigment-containing cells in the skin).

[0035] Lymphoma is a group of blood cell tumors that develop from lymphocytes. It is sometimes used to refer to just the cancerous ones rather than all tumors. There are two main types: Hodgkin lymphoma (HL) and non-Hodgkin lymphoma (NHL), with two others, multiple myeloma and immunoproliferative diseases, also included by the World Health Organization within the category. Non-Hodgkin lymphoma makes up about 90% of cases and includes a large number of sub-types. Lymphomas are part of the broader group of neoplasms called tumors of the hematopoietic and lymphoid tissues.

[0036] Leukemia is a group of cancers that usually begins in the bone marrow and results in high numbers of abnormal white blood cells. These white blood cells are not fully developed and are called blasts or leukemia cells. Symptoms may include bleeding and bruising problems, feeling very tired, and an increased risk of infections. These symptoms occur due to a lack of normal blood cells. Diagnosis is typically by blood tests or bone marrow biopsy.

[0037] Cancers include, but are not limited to, Adrenal Cancer, Anal Cancer, Bile Duct Cancer, Bladder Cancer, Bone Cancer, Brain/CNS Tumors In Adults, Brain/CNS Tumors In Children, Breast Cancer, Breast Cancer In Men, Cancer in Adolescents, Cancer in Children, Cancer in Young Adults, Cancer of Unknown Primary, Castleman Disease, Cervical Cancer, Colon/Rectum Cancer, Endometrial Cancer, Esophagus Cancer, Ewing Family Of Tumors, Eye Cancer, Gallbladder Cancer, Gastrointestinal Carcinoid Tumors, Gastrointestinal Stromal Tumor (GIST), Gestational Trophoblastic Disease, Hodgkin Disease, Kaposi Sarcoma, Kidney Cancer, Laryngeal and Hypopharyngeal Cancer, Leukemia, Leukemia—Acute Lymphocytic (ALL) in Adults, Leukemia—Acute Myeloid (AML), Leukemia—Chronic Lymphocytic (CLL), Leukemia—Chronic Myeloid (CML), Leukemia—Chronic Myelomonocytic (CMML), Leukemia in Children, Liver Cancer, Lung Cancer, Lung Cancer—Non-Small Cell, Lung Cancer—Small Cell, Lung, Carcinoid Tumor, Lymphoma, Lymphoma of the Skin, Malignant Mesothelioma, Multiple Myeloma, Myelodysplastic Syndrome, Nasal Cavity and Paranasal Sinus Cancer, Nasopharyngeal Cancer, Neuroblastoma, Non-Hodgkin Lymphoma, Non-Hodgkin Lymphoma In Children, Oral Cavity and Oropharyngeal Cancer, Osteosarcoma, Ovarian Cancer, Pancreatic Cancer, Penile Cancer, Pituitary Tumors, Prostate Cancer, Retinoblastoma, Rhabdomyosarcoma, Salivary Gland Cancer, Sarcoma—Adult Soft Tissue Cancer, Skin Cancer, Skin Cancer—Basal and Squamous Cell, Skin Cancer—Melanoma, Skin Cancer—Merkel Cell, Small Intestine Cancer, Stomach Cancer, Testicular Cancer, Thymus Cancer, Thyroid Cancer, Uterine Sarcoma, Vaginal Cancer, Vulvar Cancer, Waldenstrom Macroglobulinemia, Wilms Tumor.

[0038] The activation of growth factor receptors (GFR) is commonly known to promote neoplastic cell proliferation. For instance, many cancer treatments rely on the inhibition of growth factors, growth factors receptors and/or downstream signalling proteins such as protein kinases. Such inhibitors include, non-exhaustively, anti-Met (e.g. ARQ-197), anti-VEGF (e.g. Bevacizumab), anti-VEGFR (e.g. Sunitinib or Semaxinib), anti-Her2 (e.g. Trastuzumab), anti-EGFR (e.g. Cetuximab, Gefitinib or Erlotinib), anti-PDGFR (e.g. Imatinib), anti-IGF-1 (e.g. IMC-A12), anti-Ras (e.g. Tipifarnib), anti-Raf (e.g. Sorafenib), anti-src (e.g. Dastinib or Saracatinib), anti-Mek (e.g. C1040 or PD-0325901), anti-PI3K (e.g. LY294002), anti-PDK (e.g. UNC01), anti-HSP90 (e.g. 17-AGG or IPI-504), anti-CDK (e.g. Flavopiridol) and anti-mTOR (e.g. Everolimus).

[0039] Unlike previously reported treatments, it has been surprisingly demonstrated that the pharmaceutical associations, combinations and compositions disclosed herein can be used to treat, prevent and/or diagnose neoplasms (e.g. tumors or cancers) by activating growth factor receptors of vertebrate cells (such as mammalian cells, especially human cells).

[0040] The present invention also aims at providing mechanisms for solving and/or avoiding at least one of, preferably a plurality of, the problems, issues and/or shortcomings associated with previously reported neoplasm treatment therapies.

[0041] The present disclosure thus provides embodiments for:
[0042] Converting or recoding a neoplastic cell to induce and/or promote and/or improve self-healing and/or self-recovery thereof, particularly within a shorter period of time
[0043] Converting or recoding a neoplastic cell to induce and/or promote and/or improve self-healing and/or self-recovery thereof, particularly with a higher conversion yield;
[0044] Restoring a neoplastic cell's ability to undergo conversion into a physiologically functional and/or healthy cell, particularly within a shorter period of time;
[0045] Restoring a neoplastic cell's ability to undergo differentiation, particularly within a shorter period of time;
[0046] Converting and/or recoding a circulating or non-circulating neoplastic cell such as a cancer cell, into a non-neoplastic cell, particularly within a shorter period of time;
[0047] Protecting a subject from a neoplastic disease, disorder, condition, or pathology such as cancer, or any symptoms thereof, particularly within a shorter period of time;
[0048] Providing and/or producing a physiologically functional and/or healthy cell including an osteocyte and/or a chondrocyte and/or an adipocyte and/or a myocyte and/or a keratinocyte and/or a fibrocyte and/or a podocyte and/or a neurocyte and/or a mature endothelial cell and/or a osteoblast and/or a chondroblast and/or a neuroblast and/or a Sertoli cell and/or a Leydig cell and/or a germ cell and/or an endothelial cell and/or an angioblast and/or a fibroblast from a neoplastic cell, particularly within a shorter period of time;
[0049] Re-establishing, restoring and/or reactivating a cell adhesion checkpoint of a neoplastic cell;
[0050] Inducing and/or promoting and/or enhancing neoplastic cell differentiation, particularly within a shorter period of time;
[0051] Inducing and/or promoting and/or enhancing a decrease in Cyclin D gene and protein expression;
[0052] Inducing and/or promoting and/or enhancing a G1 to G0 cell cycle phase transition;
[0053] Inducing and/or promoting and/or enhancing the inactivation of a protein complex between a Cyclin D and at least one of Cyclin-dependent kinase (CDK) 4 or 6;
[0054] Preventing or reducing the phosphorylation of the retinoblastoma (Rb) protein thus activating its tumour suppressor functions;
[0055] Increasing the phosphorylation of the p53 protein thus reducing its degradation and activating its tumor suppressor functions;
[0056] Preventing or reducing the activation of the Ras/MAP kinase signalling cascade;
[0057] Identifying and/or analysing the features and/or markers of a neoplastic cell;
[0058] Regulating and/or activating growth factor receptors of a neoplastic cell;
[0059] Modulating and/or regulating the adhesion between a cell (in particular a neoplastic cell) and its micro-environment i.e. the surrounding extracellular matrix;
[0060] Treating, recoding or converting a neoplastic cell without temporarily or permanently damaging or killing said neoplastic cell and/or without permanently inducing a quiescent state thereof;
[0061] Dampening and/or reducing or suppressing cell division and/or cell proliferation of a neoplastic cell;
[0062] Activating and/or promoting and/or regulating anti-mitogen activity and/or tumor suppressor pathways in a neoplastic cell;
[0063] Inhibiting and/or reducing anti-oncogenic activity in a neoplastic cell;
[0064] Converting or recoding a neoplastic cell to induce and/or promote and/or improve self-healing and/or self-recovery thereof, and/or protecting a subject from a neoplastic disease, disorder, condition or pathology such as cancer using extracellular means;
[0065] Converting or recoding a neoplastic cell to induce and/or promote and/or improve self-healing and/or self-recovery thereof, protecting a subject from a neoplastic disease, disorder, condition or pathology such as cancer without modifying the genome of said cell;
[0066] Providing diagnostic tools for diagnosing neoplastic diseases in a subject.

### I. Definitions

[0067] Those skilled in the art will recognize, or be able to ascertain using no more than routine experimentation, many equivalents to the specific embodiments in accordance with the invention described herein. The scope of the present invention is not intended to be limited to the present description, but rather is as set forth in the appended claims.

[0068] In the claims, articles such as “a”, “an”, and “the” may mean one or more than one unless indicated to the contrary or otherwise evident from the context. Claims or descriptions that include “or” between one or more members of a group are considered satisfied if one, more than one, or all of the group members are present in, employed in, or otherwise relevant to a given product or process unless indicated to the contrary or otherwise evident from the context. The invention includes embodiments in which exactly one member of the group is present in, employed in, or otherwise relevant to a given product or process. The invention includes embodiments in which more than one, or all of the group members are present in, employed in, or otherwise relevant to a given product or process.

[0069] It is also noted that the term “comprising” is intended to be open and permits but does not require the inclusion of additional elements or steps. When the term “comprising” is used herein, the terms “consisting of”, “consisting essentially of”, “consisting substantially of” and “consisting exclusively of” are thus also encompassed and disclosed.

[0070] As used herein, the term “approximately” or “about,” as applied to one or more values of interest, refers to a value that is similar to a stated reference value. In certain embodiments, the term “approximately” or “about” refers to a range of values that fall within 25%, 20%, 19%, 18%, 17%, 16%, 15%, 14%, 13%, 12%, 11%, 10%, 9%, 8%, 7%, 6%, 5%, 4%, 3%, 2%, 1%, or less in either direction (greater than or less than) of the stated reference value unless otherwise indicated, self-evident or contradictory in context (e.g. except where such number would exceed 100% of a possible value).

[0071] As used herein and unless otherwise indicated or contradictory in context, the term “with” followed by a specific number of amino acids, when used to define a particular peptide, variant or analog thereof, such as in “a peptide with three amino acids”, means that such peptide, variant or analog thereof, contains exclusively the specific number of amino acids specified after this term.

[0072] As used herein and unless otherwise indicated or contradictory in context, the term “Ci-alkyl” is intended to specifically and individually disclose any branched or unbranched radical, moiety or functional group having “i” carbon atom(s).

[0073] The carbon atom content of the various hydrocarbon-containing moieties herein may be indicated by a prefix designating the minimum and maximum number of carbon atoms in the moiety. For example, in certain embodiments, (Ca-Cb)alkyl indicates an alkyl moiety of the integer “a” to the integer “b” carbon atoms, inclusive.

[0074] At various places in the present specification, substituents of compounds of the present disclosure may be disclosed in groups or in ranges. It is specifically intended that the present disclosure include each and every individual sub-combination of the members of such groups and ranges. For example, in certain embodiments, the term “C1-C5 alkyl” is an abbreviation for (and thus is specifically intended to individually disclose) C1-alkyl (i.e. methyl), C2-alkyl (i.e. ethyl), C3-alkyl (i.e. 1-propyl and 2-propyl), C4-alkyl (i.e. 1-butyl, sec-butyl, iso-butyl and tert-butyl), and C5-alkyl (i.e. 1-pentyl, 2-pentyl, 3-pentyl, 2-methyl-1-butyl, 3-methyl-1-butyl, 2-methyl-2-butyl, 3-methyl-2-butyl, 2,2-dimethyl-1-propyl and 1,1-dimethyl-1-propyl).

[0075] As used herein, unless indicated otherwise or contradictory in context, the terms “alkyl” and “(Ca-Cb)alkyl” refer to monovalent hydrocarbon radicals containing the requisite number of carbon atoms as described above, having straight or branched moieties or combinations thereof. As used herein, alkyl groups may be optionally substituted with between one to four substitutes. Non-limiting examples of alkyl groups include, e.g. methyl, ethyl, n-propyl, isopropyl, n-butyl, isobutyl, sec-butyl, t-butyl, etc. Of course, other alkyl groups will be readily apparent to those of skilled in the art given the benefit of the present disclosure.

[0076] Where ranges are given, endpoints are included. Furthermore, it is to be understood that unless otherwise indicated or otherwise evident from the context and understanding of one of ordinary skill in the art, values that are expressed as ranges can assume any specific value or sub-range within the stated ranges in different embodiments of the invention, to the tenth of the unit of the lower limit of the range, unless the context clearly dictates otherwise. For example, in certain embodiments, a disclosed 0-10 range would, for example, in certain embodiments, also specifically and individually disclose the following values and ranges: 0, 1, 2, 3, 4, 5, 6, 7, 8, 9, 10, 0.1, 0.2, 0.3, 0.4, 0.5, 0.6, 0.7, 0.8, 0.9, 1, 1.1, 1.2, 1.3, 1.4, 1.5, 1.6, 1.7, 1.8, 1.9, 2, 2.1, 2.2, 2.3, 2.4, 2.5, 2.6, 2.7, 2.8, 2.9, 3, 3.1, 3.2, 3.3, 3.4, 3.5, 3.6, 3.7, 3.8, 3.9, 4, 4.1, 4.2, 4.3, 4.4, 4.5, 4.6, 4.7, 4.8, 4.9, 5, 5.1, 5.2, 5.3, 5.4, 5.5, 5.6, 5.7, 5.8, 5.9, 6, 6.1, 6.2, 6.3, 6.4, 6.5, 6.6, 6.7, 6.8, 6.9, 7, 7.1, 7.2, 7.3, 7.4, 7.5, 7.6, 7.7, 7.8, 7.9, 8, 8.1, 8.2, 8.3, 8.4, 8.5, 8.6, 8.7, 8.8, 8.9, 9, 9.1, 9.2, 9.3, 9.4, 9.5, 9.6, 9.7, 9.8, 9.9, 10, 0-1, 0-2, 0-3, 0-4, 0-5, 0-6, 0-7, 0-8, 0-9, 1-2, 1-3, 1-4, 1-5, 1-6, 1-7, 1-8, 1-9, 2-3, 2-4, 2-5, 2-6, 2-7, 2-8, 2-9, 2-10, 3-4, 3-5, 3-6, 3-7, 3-8, 3-9, 3-10, 4-5, 4-6, 4-7, 4-8, 4-9, 4-10, 5-6, 5-7, 5-8, 5-9, 5-10, 6-7, 6-8, 6-9, 6-10, 7-8, 7-9, 7-10, 8-9, 8-10, 9-10, 0-0.1, 0-0.2, 0-0.3, 0-0.4, 0-0.5, 0-0.6, 0-0.7, 0-0.8, 0-0.9, 0-1.1, 0-1.2, etc.

[0077] As used herein and unless otherwise indicated or contradictory in context, the term “substantially” refers to the qualitative condition of exhibiting total or near-total extent or degree of a characteristic or property of interest. One of ordinary skill in the biological arts will understand that biological and chemical phenomena rarely, if ever, go to completion and/or proceed to completeness or achieve or avoid an absolute result. The term “substantially” is therefore used herein to capture the potential lack of completeness inherent in many biological and chemical phenomena.

[0078] In addition, it is to be understood that any particular embodiment of the present invention that falls within the prior art may be explicitly excluded from any one or more of the claims using the appropriate disclaimer(s) or proviso(s). Since such embodiments are deemed to be known to one of ordinary skill in the art, they may be excluded even if the exclusion is not set forth explicitly herein. Any particular embodiment of the compositions of the invention (e.g., any peptide or peptidomimetic; any method of production; any method of use; etc.) can be excluded from any one or more claims, for any reason, whether or not related to the existence of prior art.

[0079] All cited sources, for example, in certain embodiments, references, publications, databases, database entries, and art cited herein, are incorporated into this application by reference in their entirety, even if not expressly stated in the citation. In case of conflicting statements of a cited source and the instant application, the statement in the instant application shall control.

[0080] As the case may be, and unless otherwise indicated or contradictory in context, macromolecules molecular weights should be understood in the present description as being number averaged molecular weights.

[0081] The peptides mentioned in the present description may not follow the usual representation conventions. For instance, the N-terminal amino acid of a peptide sequence may be the first amino acid in the sequence or the last amino acid. Likewise, the C-terminal amino acid of a peptide sequence may be the first amino acid in the sequence or the last amino acid. For example, in the peptide sequence NAIS (SEQ ID NO: 13567), “N” may be N-terminal or C-terminal, and “S” may be N-terminal or C-terminal. Consequently, for the purpose of the present disclosure, e.g. NAIS (SEQ ID NO: 13567) also covers SIAN (SEQ ID NO: 13817), SAIS (SEQ ID NO: 13570) also covers SIAS (SEQ ID NO: 13818), SPIN (SEQ ID NO: 13573) also covers NIPS (SEQ ID NO: 13819), etc.

[0082] In the present application, when reference is made to a certain peptide (e.g. a GFR-binding compound as provided herein) comprising one or more other peptide(s), said one or more other peptide(s) is(are) understood to be stably (in most cases, covalently) attached/bound to at least one part of said peptide. The attachment/binding may be located anywhere on the peptide unless indicated otherwise, contradictory in context or contradictory to general scientific rules. No specific attachment/binding location of said one or more other peptide(s) to said peptide shall be assumed unless specifically mentioned.

[0083] Peptide or polypeptide: As used herein, the term “peptide” or “polypeptide” are used interchangeably and refers to a polymer of less than or equal to 100 amino acids long, e.g., about 2, 3, 4, 5, 10, 15, 20, 25, 30, 35, 40, 45, 50, 55, 60, 65, 70, 75, 80, 85, 90, 95 or 100 amino acids long. The terms apply to amino acid polymers in which one or more amino acid residue is an artificial chemical mimetic of a corresponding naturally occurring amino acid, as well as to naturally occurring amino acid polymers, non-naturally occurring amino acid polymers, peptide analogs, peptide variants and peptide mimetics. Conventional techniques for synthesising peptides involve the activation of the carboxylic acid function of an amino acid or of a peptide, using a coupling agent. This activated acid is then contacted with an amino acid or a peptide in which the N-terminal amino acid is not protected, thus forming an amide bond also called peptide bond. Coupling reaction conditions together with coupling agents are well known in the art and described, for instance, in Greene, “Protective Groups in Organic Synthesis”, Wiley, New York, 2007 4th edition. In addition, suitable peptide synthesis routes are described, for instance, in Hojo H., Recent progress in the chemical synthesis of proteins, Curr Opin Struct Biol. 2014; 26C:16-23 and Saranya Chandrudu, et al., Chemical Methods for Peptide and Protein Production, Molecules, 2013, 18, 4373-4388, each of which is incorporated herein by reference in its entirety. There are two main strategies for peptide synthesis i.e. liquid-phase peptide synthesis and solid-phase peptide synthesis (SPPS) which is now most commonly used for peptide synthesis. Instead of C-terminal protection with a chemical group, the C-terminus of the first amino acid is coupled to an activated solid support, such as polystyrene or polyacrylamide. This type of approach has a two-fold function: the resin acts as the C-terminal protecting group and provides a rapid method to separate the growing peptide product from the different reaction mixtures during synthesis. As with many different biological manufacturing processes, peptide synthesizers have been developed for automation and high-throughput peptide production. SPPS allows the synthesis of natural peptides which are difficult to express in bacteria, the incorporation of unnatural amino acids, peptide/protein backbone modification, and the synthesis of D-proteins, which consist of D-amino acids. Very long peptide can be accessed by using native chemical ligation to couple two peptides together with quantitative yields.

[0084] Peptide analogs: As used herein, unless indicated otherwise or contradictory in context, the term “peptide analogs” refers to polypeptide variants which differ by one or more amino acid alterations, e.g., substitutions, additions or deletions of amino acid residues that still maintain one or more of the properties of the parent or starting peptide.

[0085] Peptide variants: As used herein, unless indicated otherwise or contradictory in context, the term “peptide variants” refers to a peptide which has a certain identity with a native or reference compound sequence. In one example, the peptide variant refers to any post-administration, application, injection modified peptide. Such post-administration, application, injection modifications include, but are not limited to, phosphorylation, acetylation, glutamylation, tyrosination, palmitoylation, glycosylation, myristoylation, palmitoylation, isoprenylation, glypiation, lipoylation, phosphopantetheinylation, acylation, alkylation, amidation, arginylation, polyglutamylation, polyglycylation, butyrylation, gamma-carboxylation, glycosylation, polysialylation, malonylation, hydroxylation, iodination, nucleotide addition, oxidation, adenylylation, propionylation, pyroglutamate formation, S-glutathionylation, S-nitrosylation, succinylation, sulfation, glycation, biotinylation, pegylation, ISGylation, SUMOylation, ubiquitination, Neddylation, Pupylation, citrullination, deamidation, eliminylation, carbamylation, and racemization.

[0086] Peptido-mimetic: As used herein, unless indicated otherwise or contradictory in context, the term “peptido-mimetic” or “peptidomimetic” refers to a synthetic chemical compound which comprises amino acids but not only and that is able to mimic the biological action of a peptide, often because the mimetic has a basic structure that mimics the basic structure of the peptide and/or has the salient biological properties of that peptide. In one particular example, a peptidomimetic is a hybrid molecule containing both, at least one peptide, and at least one of a polysaccharide, a polynucleotide or a linear or branched, saturated or unsaturated, hydrocarbon chain.

[0087] Linear peptide: As used herein, unless indicated otherwise or contradictory in context, the term “linear peptide” means a peptide in which the C-terminal and the N-terminal amino acid residues do not covalently interact with each other and none of the C-terminal or the N-terminal amino acid residues covalently interacts with another amino acid residue of the peptide chain.

[0088] Cyclic peptide: As used herein, unless indicated otherwise or contradictory in context, the term “cyclic peptide” means peptide in which the C-terminal and N-terminal amino acid residues do covalently interact with each other or the C-terminal and/or the N-terminal amino acid residues covalently interact with at least one other amino acid residue of the peptide chain so as to form a ring-like structure.

[0089] Amino acid: As used herein, unless indicated otherwise or contradictory in context, the term “amino acid” refers to naturally occurring and non-naturally occurring amino acids including amino acid analogs. Naturally occurring amino acids are those encoded by the genetic code, as well as those amino acids that are later modified, e.g., hydroxyproline, [gamma]-carboxyglutamate, and O-phosphoserine. Naturally encoded amino acids are the 20 common amino acids glycine (Gly, G), alanine (Ala, A), valine (Val, V), leucine (Leu, L), isoleucine (Ile, I), serine (Ser, S), threonine (Thr, T), phenylalanine (Phe, F), tyrosine (Tyr, Y), tryptophane (Trp, W), cysteine (Cys, C), methionine (Met, M), proline (Pro, P), aspartic acid (Asp, D), asparagine (Asn, N), glutamine (Gln, Q), glutamic acid (Glu, E), histidine (His, H), arginine (Arg, R) et lysine (Lys, K) and pyrrolysine and selenocysteine. Non-naturally occurring amino acids include, but are not limited to, the dextrogyre (D) isomers of the above-cited naturally-occurring amino acids. Amino acid analogs refers to compounds that have the same basic chemical structure as a naturally occurring amino acid i.e., an [alpha] carbon that is bound to a hydrogen, a carboxyl group, an amino group, and an R group (i.e. side chain), and which may be used in replacement thereof without substantially affecting the overall function of the peptide to which it belongs. Amino acid analogs (or non-naturally occurring amino acids) that may be suitable for implementing embodiments of the present invention include, but are not limited to, amino acids comprising a photoactivatable cross-linker, spin-labeled amino acids, fluorescent amino acids, metal binding amino acids, metal-containing amino acids, radioactive amino acids, amino acids with novel functional groups, amino acids that covalently or noncovalently interact with other molecules, photocaged and/or photoisomerizable amino acids, amino acids comprising biotin or a biotin analogue, glycosylated amino acids such as a sugar substituted serine, other carbohydrate modified amino acids, keto-containing amino acids, amino acids comprising polyethylene glycol or polyether, heavy atom substituted amino acids, chemically cleavable and/or photocleavable amino acids, amino acids with an elongated side chains as compared to natural amino acids, including but not limited to, polyethers or long chain hydrocarbons, including but not limited to, greater than about 5 or greater than about 10 carbons, carbon-linked sugar-containing amino acids, redox-active amino acids, amino thioacid containing amino acids, and amino acids comprising one or more toxic moiety. The term “AA^{I}” (AA roman numeral one) may be used in the description and refers to an amino acid which may be any amino acid as defined above in particular any naturally occurring and non-naturally occurring amino acids.

[0090] Amino acid side chain: As used herein, unless indicated otherwise or contradictory in context, the term “amino acid side chain” means the functional group of an amino acid that differentiates it from other amino acids. All amino acid structures have a carboxyl group, an amine group and a specific side chain.

[0091] AA^{II} (AA roman numeral two): As used herein, unless indicated otherwise or contradictory in context, the terms “polar amino acid” or “AA^{II}” means amino acids having a polar, non-charged group-containing side chain. Polar amino acids are protonated at physiological pH (about 7). Examples of polar amino acids include, but are not limited to, Cys (C), Asn (N), Gln (Q), Ser (S), Thr (T), or Tyr (Y).

[0092] AA^{III} (AA roman numeral three): As used herein, unless indicated otherwise or contradictory in context, the terms “acidic amino acid” or “AA^{III}” means amino acids having an acidic group-containing side chain. Acidic amino acid deprotonated forms predominate at physiological pH (about 7). Examples of acidic amino acids include, but are not limited to, Asn (N) and Glu (E).

[0093] AA^{IV} (AA roman numeral four): As used herein, unless indicated otherwise or contradictory in context, the terms “aliphatic amino acid” or “AA^{IV}” means amino acids having an aliphatic side chain. Examples of aliphatic amino acids include, but are not limited to, Ala (A), Leu (L), Ile (I), Gly (G), Val (V) and any analogs and derivatives thereof.

[0094] AA^{V} (AA roman numeral five): As used herein, unless indicated otherwise or contradictory in context, the terms “apolar amino acid” or “AA^{V}” means amino acids having an apolar side chain. Examples of apolar amino acids include, but are not limited to, Ala (A), Phe (F), Gly (G), Ile (I), Leu (L), Met (M), Pro (P), Val (V) or Trp (W).

[0095] AA^{VI} (AA roman numeral six): As used herein, unless indicated otherwise or contradictory in context, the term “aromatic amino acid” or “AA^{VI}” means amino acids having an aromatic group-containing side chain. Examples of aromatic amino acids include, but are not limited to, Trp (W), Tyr (Y) or Phe (F).

[0096] AA^{VII} (AA roman numeral seven): As used herein, unless indicated otherwise or contradictory in context, the term “basic amino acid” or “AA^{VII}” means amino acids having a basic group-containing side chain. Basic amino acid protonated forms predominate at physiological pH (about 7). Examples of basic amino acids include, but are not limited to, Arg (R), His (H), or Lys (K).

[0097] AA^{VIII} (AA roman numeral eight): As used herein, unless indicated otherwise or contradictory in context, the term “AA^{VIII}” means Leu (L) or lie (I) and any analogs and derivatives thereof.

[0098] AA^{IX} (AA roman numeral nine): As used herein, unless indicated otherwise or contradictory in context, the term “charged amino acid” or “AA^{IX}” means amino acids having either an acidic group-containing side chain or an basic group-containing side chain. Charged amino acid charged forms predominate at physiological pH (about 7). Examples of charged amino acids include, but are not limited to, Asn (N), Glu (E), His (H), Lys (K) or Arg (R).

[0099] AAⁿ: As used herein, unless indicated otherwise or contradictory in context, the term “AAⁿ”, in which n is a positive integer arbitrarily chosen to identify a specific position within the primary sequence of a peptide. For instance, AA¹³ means the amino acid of position 13. The terms “amino acid” and “AA” are interchangeably used in the present description.

[0100] N-terminal: As used herein, unless indicated otherwise or contradictory in context, the term “N-terminal” means the amine (—NH₂) function/group/moiety located at one (terminal) end of a protein or polypeptide. This functional group is the only amine group which is not engage in n amide peptide bond.

[0101] C-terminal: As used herein, unless indicated otherwise or contradictory in context, the term “C-terminal” means the carboxylate (—CO₂H) function/group/moiety located at one (terminal) end of a protein or polypeptide. This functional group is the only carboxylic acid group which is not engage in n amide peptide bond.

[0102] Naturally-occurring peptide: As used herein, unless indicated otherwise or contradictory in context, the terms “naturally-occurring peptide” or “natural peptide” means a peptide which may be found in nature without human direct intervention (except for its extraction and/or isolation).

[0103] Synthetic peptide: As used herein, unless indicated otherwise or contradictory in context, the terms “synthetic peptide” or “non-natural peptide” means a peptide which may not be found in nature without human direct intervention (except for its extraction and/or isolation). For example, in certain embodiments, a synthetic peptide may have the amino acid sequence of a natural peptide except for at least one amino acid deletion or substitution relative to the natural sequence. In the case of a substitution, an amino acid from the natural sequence is replaced by another, different, naturally-occurring or non-naturally occurring amino acid. For example, in certain embodiments, a synthetic peptide may not possess a post-translational modification of the natural peptide such as the attachment of an acetate group, a phosphate group, a lipid, a carbohydrate, or the formation of a disulfide bridge.

[0104] Covalent interaction: As used herein, unless indicated otherwise or contradictory in context, the term “interact covalently”, “covalent interaction” or “covalent bond” are interchangeably used and means a chemical bond or interaction that involves the sharing of electron pairs between atoms. Examples of such interactions are 6-bonding and π-bonding.

[0105] Non-covalent interaction: As used herein, unless indicated otherwise or contradictory in context, the term “interact non-covalently”, “non-covalent interaction” or “non-covalent bond” are interchangeably used and means a chemical bond or interaction that does not involve the sharing of electron pairs between atoms but rather involves more dispersed variations of electromagnetic interactions between molecules or within a molecule. Non-covalent interactions can be generally classified into four categories, electrostatic interactions, n-interactions, van der Waals forces, and hydrophobic interactions.

[0106] Electrophile: As used herein, unless indicated otherwise or contradictory in context, the term “electrophile” means an organic molecule attracted to electrons that participates in a chemical reaction by accepting an electron pair in order to bond to a nucleophile. Most electrophiles are positively charged, have an atom that carries a partial positive charge, or have an atom that does not have an octet of electrons.

[0107] Nucleophile: As used herein, unless indicated otherwise or contradictory in context, the term “nucleophile” means an organic molecule that donates an electron pair to an electrophile to form a chemical bond in relation to a reaction. All molecules or ions with a free pair of electrons or at least one pi bond can act as nucleophiles.

[0108] Polysaccharide: As used herein, unless indicated otherwise or contradictory in context, the term “polysaccharide” means polymeric carbohydrate molecules composed of long chains of monosaccharide units bound together by glycosidic linkages and which upon hydrolysis provide monosaccharides or oligosaccharides. They range in structure from linear to highly branched polymers.

[0109] Polynucleotide: As used herein, the term “polynucleotide” or “nucleic acid”, which are used interchangeably, refers to the phosphate ester polymeric form of ribonucleosides (“RNA molecules”) or deoxyribonucleosides (“DNA molecules”), or any phosphoester analogs thereof, such as phosphorothioates and thioesters, in either single stranded form, or a double-stranded helix. The term “nucleic acid” includes double-stranded DNA round, inter alia, in linear (e.g., restriction fragments) or circular DNA molecules. In particular, nucleic acids as used herein refer to nucleic acids such as RNAs encoding for agonist of growth factor receptors as defined herein.

[0110] Nucleoside: As used herein, the term “nucleoside” refers to a compound containing a sugar molecule (e.g., a pentose or ribose) or derivative thereof in combination with an organic base (e.g., a purine or pyrimidine) or a derivative thereof (also referred to herein as “nucleobase”).

[0111] Nucleotide: As used herein, the term “nucleotide” refers to a nucleoside including a phosphate group.

[0112] Dendrimer: As used herein, unless indicated otherwise or contradictory in context, the term “dendrimer” means any repetitively branched molecules. Examples of dendrimers are phosphorous dendrimers, polylysine dendrimers, polypropylenimine dendrimers and PAMAM dendrimers, such as the ones described, for instance, in Scientific World Journal. 2013; 2013:732340; Curr Opin Chem Biol. 1998; 2(6):733-42; J Pept Sci. 1999; 5(5):203-20; and J Pept Sci. 2008; 14(1):2-43, which may be used for implementing embodiments of the present invention, each of which being herein incorporated by reference in its entirety.

[0113] Synthetic molecule: As used herein, unless indicated otherwise or contradictory in context, the term “synthetic molecule” means a molecule which may not be found in nature without human direct intervention (except for its extraction and/or isolation).

[0114] Synthetic polymers: As used herein, unless indicated otherwise or contradictory in context, the term “synthetic polymer” refers to a macromolecule or polymer which may not be found in nature without human direct intervention (except for its extraction and/or isolation).

[0115] Biocompatible: As used herein, unless indicated otherwise or contradictory in context, the term “biocompatible” means compatible with living cells, tissues, organs or systems posing little to no risk of injury, toxicity or rejection by the immune system.

[0116] Biologically active: As used herein, unless indicated otherwise or contradictory in context, the term “biologically active” refers to a characteristic of any substance that has activity in a biological system and/or organism. For instance, a substance that, when administered to an organism, has a biological effect on that organism, is considered to be biologically active. In particular examples, a compound, substance or pharmaceutical composition of the present disclosure may be considered biologically active even if a portion of the compound, substance or pharmaceutical composition is biologically active or mimics an activity considered biologically relevant.

[0117] Stem cells: As used herein, unless indicated otherwise or contradictory in context, the term “stem cell” refers to the term as it is generally understood in the art. For example, in certain embodiments, stem cells, regardless of their source, are cells that are capable of dividing and renewing themselves for long periods, are at least to a degree unspecialized (undifferentiated), and can give rise to (differentiate into) specialized cell types (i.e., they are progenitor or precursor cells for a variety of different, specialized cell types).

[0118] Mesenchymal stem cells: As used herein, unless indicated otherwise or contradictory in context, the term “mesenchymal stem cells” generally means multipotent adult stromal cells that can differentiate into a variety of cell types, such as osteoblasts, chondrocytes, and adipocytes.

[0119] Stem cell-like: As used herein, unless indicated otherwise or contradictory in context, the term “Stem cell-like” refers to a cell which is not a stem cell by its origin but functions as a stem cell and presents similar characteristics such as, for example, the expression of stemness markers like Stro-1 and/or is multipotent thus has the ability to differentiate into various cell types.

[0120] Progenitor cells: As used herein, unless indicated otherwise or contradictory in context, the term “progenitor cells” generally means a biological cell that, like any stem cell, has a tendency to differentiate into a specific type of cell, but is already more specific than a stem cell and is pushed to differentiate into its “target” cell. Stem cells can generally replicate indefinitely, whereas progenitor cells can divide only a limited number of times.

[0121] Adult stem cells: As used herein, unless indicated otherwise or contradictory in context, the term “adult stem cells” means undifferentiated cells, found throughout the body after development, that multiply by cell division to replenish dying cells and regenerate damaged tissues. Also known as somatic stem cells, they can be found in juvenile as well as adult animals and human bodies.

[0122] Differentiation: As used herein, unless indicated otherwise or contradictory in context, the term “differentiation” refers to the process by which a less specialized cell becomes a more specialized cell type and involves a switch from one gene expression pattern to another.

[0123] Differentiated cells: As used herein, unless indicated otherwise or contradictory in context, the term “differentiated cells” generally means any cell of a specific lineage at the exception of cells containing stem cell specific markers.

[0124] Non-terminally differentiated: As used herein, unless indicated otherwise or contradictory in context, the term “non-terminally differentiated”, when used in relation to a cell, refers to a differentiated cell as defined herein which has not reached its final state of differentiation. For example, in certain embodiments, in the Osteoblast cell lineage, a non-terminally differentiated cell is any differentiated cell of the lineage at the exception of an osteocyte.

[0125] Terminally differentiated: As used herein, unless indicated otherwise or contradictory in context, the term “terminally differentiated”, when used in relation to a cell, refers to a differentiated cell as defined herein which has reached its final state of differentiation. For example, in certain embodiments, in the Osteoblast cell lineage, a terminally differentiated cell is an osteocyte.

[0126] Methods for obtaining stem cells: Methods for obtaining such stem cells and providing initial culture conditions, such as a liquid culture or semi-solid culture medium, are known in the art. The cells are initially expanded in vivo or in vitro, by contacting the source of the stem cells with a suitable reagent that expands or enriches such cells in the tissue source or in culture. Preferably, adult stem cells are isolated from a tissue source and then expanded or enriched in vitro by exposure to a suitable agent. Cells are obtained from an individual by any suitable method for obtaining a cell sample from an animal, including, but not limited, to, collection of bone marrow collection of a bodily fluid (e.g., blood), collection of umbilical cord blood, tissue punch, and tissue dissection, including particularly, but not limited to, any biopsies of skin, intestine, cornea, spinal cord, brain tissue, scalp, stomach, breast, lung (e.g., including lavage and bronchioschopy), fine needle aspirates of the bone marrow, amniotic fluid, placenta and yolk sac.

[0127] Cell lineage: As used herein, unless indicated otherwise or contradictory in context, the term “cell lineage” refers to the developmental history of a particular cell from its primary state in the fertilized egg or embryo through to its fully differentiated state. The different steps and phases involved in the development of a cell produces many intermediate cells which may be referred to as progenitor or precursor cells in the present application and form an integral part of the cell lineage.

[0128] Bone: It is conventionally known that mature osteoblasts are the cells responsible for bone formation and are derived from osteoblast precursors. Differentiation of human bone marrow mesenchymal stem cells and osteoblast precursors is one of the important processes for bone regeneration. Osteoblasts differentiate from mesenchymal stem cells. Mature osteoblasts differentiate from osteoblast precursors and into osteocytes which are non-dividing cells. Bone-related neoplastic diseases include, but are not limited to, bone primary tumors (benign tumors or cancers) such as osteoma, osteoid osteoma, osteochondroma, osteoblastoma, enchondroma, giant cell tumor of bone, aneurysmal bone cyst, fibrous dysplasia of bone, osteosarcoma, chondrosarcoma, Ewing's sarcoma, fibrosarcoma; and secondary tumors (i.e. metastasize) such as, for example, in certain embodiments, carcinomas of the prostate, breasts, lungs, thyroid, and kidneys.

[0129] Osteoblast cell lineage: As used herein, unless indicated otherwise or contradictory in context, the term “osteoblast cell lineage” refers to bone cells at any stage of their development and thus include, but are not limited to, mesenchymal stem cells, osteoblasts, osteocytes or any precursors thereof.

[0130] Cartilage: Native chondrocytes are responsible for the synthesis and turnover of the cartilage extracellular matrix (ECM), which provides an environment of nutrition diffusion for chondrocytes and provides the joint surface with biomechanical competence. Chondrogenic cells arise from pluripotential adult mesenchymal stem cells (MSCs) through a series of differentiation pathways. Chondrogenic differentiation of MSCs is induced by various intrinsic and extrinsic factors. Growth factors play an important role in this process. For instance, in the hyaline cartilage, growth factors regulate homeostasis and integrity, as well as development. Cartilage-related neoplastic diseases include, but are not limited to, Chondroma/ecchondroma/enchondroma (Enchondromatosis, Extraskeletal chondroma), Chondrosarcoma (Mesenchymal chondrosarcoma, Myxoid chondrosarcoma), Osteochondroma (Osteochondromatosis), Chondromyxoid fibroma, and Chondroblastoma,

[0131] Chondrocytic cell lineage: As used herein, unless indicated otherwise or contradictory in context, the term “chondrocytic cell lineage” refers to cartilage cells at any stage of their development and thus include, but are not limited to, mesenchymal stem cells, chondroblasts, chondrocytes or any precursors thereof.

[0132] Muscles: Skeletal muscle is a highly complex and heterogeneous tissue serving a multitude of functions in the organism. The process of generating muscle—myogenesis—can be divided into several distinct phases. During embryonic myogenesis, mesoderm-derived structures generate the first muscle fibers of the body proper, and in subsequent waves additional fibers are generated along these template fibers. In the perinatal phase, muscle resident myogenic progenitors initially proliferate extensively but, later on, decrease as the number of myonuclei reaches a steady state and myofibrillar protein synthesis peaks. Once the muscle has matured, these progenitors will enter quiescence and henceforth reside within it as satellite cells. Adult skeletal muscle, like all renewing organs, relies on a mechanism that compensates for the turnover of terminally differentiated cells to maintain tissue homeostasis. This type of myogenesis depends on the activation of satellite cells that have the potential to differentiate into new fibers. The most comprehensively studied form of myogenesis takes place when mature muscle is damaged and large cohorts of satellite cells expand mitotically and differentiate to repair the tissue and reestablish homeostasis. It is now generally accepted that satellite cells are closely related to progenitors of somatic origin. The activation of the network of transcription factors that controls skeletal muscle development depends on paracrine factors that are released by adjacent tissues, such as the neural tube, notochord, surface ectoderm and lateral mesoderm. Several secreted factors have been identified that determine the spatial and temporal onset of myogenesis. Signalling molecules, such as Noggin and bone morphogenetic proteins (BMPs)—which inactivate and activate receptors of the transforming growth factor-β (TGFβ) superfamily, respectively—are reported to participate in the orchestration of the activation of myogenesis. Muscle-related neoplastic diseases include, but are not limited to, Rhabdomyosarcoma, and Leiomyosarcoma.

[0133] Muscle cell lineage: As used herein, unless indicated otherwise or contradictory in context, the term “muscle cell lineage” refers to muscle cells at any stage of their development and thus include, but are not limited to, mesenchymal stem cells, myoblasts, myocytes or any precursors thereof.

[0134] Vascular: The vasculature in the human body forms through two distinct processes: vasculogenesis and angiogenesis. Vasculogenesis is defined as the process of de novo blood vessel formation occurring when endothelial precursor cells (angioblasts) migrate and differentiate into endothelial cells which form the new vessel. These vascular trees are then extended through angiogenesis which is defined as the new vessel formation secondary to proliferation of endothelial cells from pre-existing vessels. Vasculogenesis as well as angiogenesis occur during the embryologic development of the circulatory system but also in the adult organism from circulating endothelial progenitor cells (derivatives of stem cells) able to contribute, albeit to varying degrees, to neovascularization. Vascular-related neoplastic diseases include, but are not limited to, Hemangiosarcoma, Kaposi's sarcoma, Lymphangiosarcoma, and Infantile hemangio-pericytoma.

[0135] Vascular cell lineage: As used herein, unless indicated otherwise or contradictory in context, the term “vascular cell lineage” refers to vascular cells at any stage of their development and thus include, but are not limited to, mesenchymal stem cells, angioblast, pericytes and endothelial cells or any precursors thereof.

[0136] Neurons: It was recently reported that neural cells can be regenerated from neural stem cells (NSCs). These are self-renewing, multipotent adult stem cells that generate the main phenotype of the nervous system. They undergo asymmetric cell division into two daughter cells, one non-specialized and one specialized. NSCs primarily differentiate into neurons, astrocytes, and oligodendrocytes. NSCs are generated throughout an adult's life via the process of neurogenesis. NSCs can be differentiated to replace lost or injured neurons or in many cases even glial cells. NSCs are stimulated to begin differentiation via exogenous cues from their microenvironment, or the neural stem cell niche. This niche defines a zone in which stem cells are retained after embryonic development for the production of new cells of the nervous system. This continual supply of new neurons and glia then provides the postnatal and adult brain with an added capacity for cellular plasticity. Critical to the maintenance of the stem cell niche are microenvironmental cues and cell-cell interactions that act to balance stem cell quiescence with proliferation and to direct neurogenesis versus gliogenesis lineage decisions. Several proteins like different growth factors are involved in the mechanisms of the neural stem cell niche as well as in the maintenance and growth of the newly formed neurons. These include the BMPs, FGFs, PDGF, VEGF, TGF β, BDNF and others. Neuron-related neoplastic diseases include, but are not limited to, Anaplastic astrocytoma, Astrocytoma, Central neurocytoma, Choroid plexus carcinoma, Choroid plexus papilloma, Choroid plexus tumor, Dysembryoplastic neuroepithelial tumour, Ependymal tumor, Fibrillary astrocytoma, Giant-cell glioblastoma, Glioblastoma multiforme, Gliomatosis cerebri, Gliosarcoma, Hemangiopericytoma, Medulloblastoma, Medulloepithelioma, Meningeal carcinomatosis, Neuroblastoma, Neurocytoma, Oligoastrocytoma, Oligodendroglioma, Optic nerve sheath meningioma, Pediatric ependymoma, Pilocytic astrocytoma, Pinealoblastoma, Pineocytoma, Pleomorphic anaplastic neuroblastoma, Pleomorphic xanthoastrocytoma, Primary central nervous system lymphoma, Sphenoid wing meningioma, Subependymal giant cell astrocytoma, Subependymoma, and Trilateral retinoblastoma.

[0137] Neuronal cell lineage: As used herein, unless indicated otherwise or contradictory in context, the term “neuron lineage” refers to brain cells at any stage of their development and thus include, but are not limited to, neural stem cells, neuroblast, neurocyte and neuroglial cells or any precursors thereof.

[0138] Eye retina: The vertebrate retina is a light-sensitive layer of tissue, lining the inner surface of the eye. Retinal development involves a complex progression of tissue induction, proliferation of retinal progenitor cell (RPC) populations and terminal differentiation of these cells into specific functional types. Bone morphogenetic protein (BMP), is a member of the transforming growth factor (TGF)-β family of signaling molecules plays an important role in the retinal cell development. BMP-2, -4, and -7 and their receptors (BMPRs) are expressed in the eye during embryogenesis and are essential for multiple aspects of retinal development. Retina-related neoplastic diseases include, but are not limited to, Retinoblastoma. It should also be noted that eye cancers can be primary (starts within the eye) and metastatic (spread to the eye from another organ). The two most common cancers that would spread to the eyes from another organ are breast cancer and lung cancer. Other, less common, sites of origin include prostate, kidney, thyroid, skin, colon and blood or bone marrow.

[0139] Retinal cell lineage: As used herein, unless indicated otherwise or contradictory in context, the term “retinal cell lineage” refers to eye retina cells at any stage of their development and thus include, but are not limited to, photoreceptor, bipolar cells, rod and cone cells or any precursors thereof.

[0140] Kidneys: The kidneys are composed of complex tissues consisting of several different cell types including glomerular podocytes, endothelial cells, mesangial cells, interstitial cells, tubular epithelial cells, and connecting duct cells. These cell types interact to establish a precise cellular environment that functions as an efficient tissue. Kidneys-related neoplastic diseases include, but are not limited to, Squamous cell carcinoma, Juxtaglomerular cell, tumor (reninoma), Angiomyolipoma, Renal oncocytoma, Bellini duct carcinoma, Clear-cell sarcoma of the kidney, Mesoblastic nephroma, Wilms' tumor, Mixed epithelial stromal tumor, Clear cell adenocarcinoma, Transitional cell carcinoma, Inverted papilloma, Renal lymphoma, Teratoma, Carcinosarcoma, and Carcinoid tumor.

[0141] Renal cell lineage: As used herein, unless indicated otherwise or contradictory in context, the term “renal cell lineage” refers to renal cells at any stage of their development and thus include, but are not limited to, mesenchymal stem cells, podocytes, or any precursors thereof.

[0142] Ligaments and Tendons: Tendons and ligaments (T/L) are dense connective tissues of mesodermal origin. They connect and transmit force from muscle to bone and bone to bone, respectively. Both tissues are able to store elastic energy and withstand hightensile forces, on which locomotion is entirely dependent. T/L are predominantly composed of collagen type I fibrils organized in a highly hierarchical manner that is unique for the T/L. Other collagens (types III-VI, XI, XII, XIV, and XV) and various proteoglycans (decorin, cartilage oligomeric matrix protein (COMP), byglican, lumican, fibromodulin, tenascin-C, etc.) are building the remaining T/L substance. The cellular content of T/L is dominated by tendon-specific fibroblasts named tenocytes. During embryonic development, the tendon-specific cells descend from a sub-set of mesenchymal progenitors condensed in the syndetome, a dorsolateral domain of the sclerotome. L/T-related neoplastic diseases include, but are not limited to, Fibrosarcoma, Malignant fibrous, Hystiocytoma, and Dermatofibrosarcoma.

[0143] Ligament and tendon cell lineage: As used herein, unless indicated otherwise or contradictory in context, the term “ligament and tendon cell lineage” or “L/T cell lineage” refers to bone or cartilage cells at any stage of their development and thus include, but are not limited to, mesenchymal stem cells, fibroblasts, fibrocytes, or any precursors thereof.

[0144] Skin: The skin constantly renews itself throughout adult life. Stem cells (SCs) residing in the epidermis ensure the maintenance of adult skin homeostasis, but they also participate in the repair of the epidermis after injuries. The skin protects the body from dehydration, injury and infection. The skin consists of an underlying dermis, separated by a basement membrane from the multilayered overlaying epidermis. The dermis is of mesodermal embryonic origin and contains as adult stem cells fibroblastic mesenchymal stem-cell-like cells. These cells have a multi-lineage differentiation potential, being also able to form adipose tissue or bones. Skin-related neoplastic diseases include, but are not limited to, basal cell carcinoma, squamous cell carcinoma, malignant melanoma, dermatofibrosarcoma protuberans, Merkel cell carcinoma, Kaposi's sarcoma, keratoacanthoma, spindle cell tumors, sebaceous carcinomas, microcystic adnexal carcinoma, Paget's disease of the breast, atypical fibroxanthoma, leiomyosarcoma, and angiosarcoma.

[0145] Fibroblast lineage: As used herein, unless indicated otherwise or contradictory in context, the term “fibroblast lineage” refers to skin cells at any stage of their development and thus include, but are not limited to, mesenchymal stem cells, fibroblasts, keratinocytes, Merkel cells, melanocytes, Langerhans cells, and any precursor cells thereof.

[0146] Reproduction: Reproduction (or procreation) is the biological process by which new offspring individual organisms are produced from their parents. Sexual reproduction is a biological process by which organisms create descendants that have a combination of genetic material contributed from two (usually) different members of the species. The development and physiological functions of basic structures in the mammalian reproductive system are influenced by the tissue-specific expression of members of different growth factors families like the BMP family. The establishment of the germ line is a fundamental aspect of reproduction. Germ cell determination is induced in epiblast cells by the extraembryonic ectoderm, and is not acquired through the inheritance of preformed germ plasma. There is some strong evidence that BMP-4 and -8b play a central role in determining primordial germ cell (PGC) formation in the embryo. The genes encoding BMP-4 and -8b have overlapping expression in the extraembryonic ectoderm before gastrulation, i.e., before PGCs are seen. Thus, PGC formation requires BMP-4 expression. There is also evidence from knockout mammals that BMP-8b is required for PGC formation. Furthermore, there is increasing evidence that locally produced BMPs play a major role in the differentiation of the pituitary gonadotrope. Reproduction-related neoplastic diseases include, but are not limited to, Prostate cancer, Ovary cancer (adenocarcinoma, or glandular cancer) also known as carcinoma of the prostate or prostatic intraepithelial neoplasia.

[0147] Reproduction system lineage: As used herein, unless indicated otherwise or contradictory in context, the term “reproduction system lineage” refers to Sertoli cells, Leydig cell and Germ cell at any stage of their development, in particular, mesenchymal stem cells.

[0148] Blood: Blood is a bodily fluid in animals that delivers necessary substances such as nutrients and oxygen to the cells and transports metabolic waste products away from those cells. When it reaches the lungs, gas exchange occurs wherein carbon dioxide is diffused out of the blood into the alveoli and oxygen is diffused into the blood. This oxygenated blood is pumped to the left hand side of the heart in the pulmonary vein and enters the left atrium. From here it passes through the bicuspid valve, through the ventricle and taken all around the body by the aorta. Blood contains antibodies, nutrients, oxygen and much more to help the body work. In vertebrates, it is composed of blood cells suspended in blood plasma. Plasma, which constitutes 55% of blood fluid, is mostly water (92% by volume), and contains dissipated proteins, glucose, mineral ions, hormones, carbon dioxide (plasma being the main medium for excretory product transportation), and blood cells themselves. Albumin is the main protein in plasma, and it functions to regulate the colloidal osmotic pressure of blood. Hematopoietic stem cells (HSCs) are the blood cells that give rise to all the other blood cells and are derived from the mesoderm. They are located in the red bone marrow, which is contained in the core of most bones. The HSCs give rise to the myeloid lineage (monocytes and macrophages, neutrophils, basophils, eosinophils, erythrocytes, megakaryocytes/platelets, dendritic cells), and to the lymphoid lineages (T-cells, B-cells, NK-cells). The most abundant cells in the vertebrate blood are red blood cells (also called RBSs or erythrocytes). These contain hemoglobin, an iron-containing protein, which facilitates oxygen transport by reversibly binding to this respiratory gas and greatly increasing its solubility in blood. Blood-related neoplastic diseases include, but are not limited to, acute lymphoblastic leukemia (ALL), acute myeloid leukemia (AML), chronic lymphocytic leukemia (CLL) and chronic myeloid leukemia (CML).

[0149] Blood cell lineages (myeloid lineage and lymphoid lineage): As used herein, unless indicated otherwise or contradictory in context, the term “blood cell lineages” refers to blood cells at any stage of their development from the myeloid or from the lymphoid lineage, and thus include, but are not limited to, hematopoietic stem cells (HSC), myeloid progenitors, lymphoid progenitors, mast cells, myeloblasts, monocytes, macrophages, neutrophils, basophils, eosinophils, erythrocytes, megakaryocytes, thrombocytes, dendritic cells, small lymphocytes, T-lymphocytes (T-cells), B-lymphocytes (B-cells), natural killer (NK)-cells, and any precursor cells thereof.

[0150] Adipose tissue: Adipose tissue is loose connective tissue composed mostly of adipocytes. In addition to adipocytes, adipose tissue contains the stromal vascular fraction (SVF) of cells including preadipocytes, fibroblasts, vascular endothelial cells and a variety of immune cells (i.e. adipose tissue macrophages (ATMs)). Adipose tissue is derived from preadipocytes. Its main role is to store energy in the form of lipids, although it also cushions and insulates the body. Pre-adipocytes are thought to be undifferentiated fibroblasts that can be stimulated to form adipocytes. The pre-adipocytes originate from mesenchymal stem cells. Areolar connective tissue is composed of adipocytes. The term “lipoblast” is used to describe the precursor of the adult cell. The term “lipoblastoma” is used to describe a tumor of this cell type. Adipose tissue-related neoplastic diseases include, but are not limited to, lipoma, Adenolipomas, Angiolipoleiomyomas, Angiolipomas, Corpus callosum lipoma, Cerebellar pontine angle and internal auditory canal lipomas, Chondroid lipomas, Hibernomas, Intradermal spindle cell lipomas, Neural fibrolipomas, Pleomorphic lipomas, Spindle-cell lipomas, Superficial subcutaneous lipomas, Lipoblastoma, Liposarcoma.

[0151] Adipocyte lineage: As used herein, unless indicated otherwise or contradictory in context, the term “adipocyte cell lineage” refers to adipocyte cells at any stage of their development and thus include, but are not limited to, mesenchymal stem cells, areolar connective cells, adipocytes, pre-adipocytes/lipoblasts, and any precursor cells thereof.

[0152] Digestive system: The human digestive system is composed mainly of the gastrointestinal tract (including the esophagus, stomach, small intestine, large intestine, rectum and anus) and the accessory digestive glands (the liver, the gall bladder and the pancreas). To achieve the goal of providing energy and nutrients to the body, six major functions take place in the digestive system: ingestion, secretion, mixing and movement, digestion, absorption, excretion. The gastrointestinal wall refers to the specialized series of tissue layers surrounding the lumen of the gastrointestinal tract. The general structure involves the four following layers (ordered from the lumen outward): mucosa, submucosa, muscularis externa, serosa (if the tissue is intraperitoneal)/adventitia (if the tissue is retroperitoneal). Gastrointestinal cancer refers to malignant conditions of the gastrointestinal tract (GI tract) and accessory organs of digestion. The symptoms relate to the organ affected and can include obstruction (leading to difficulty swallowing or defecating), abnormal bleeding or other associated problems. Gastrointestinal tissue-related neoplastic diseases include, but are not limited to, Esophageal cancer, Stomach cancer, Pancreatic cancer, Liver cancer, Gallbladder cancer, MALT lymphoma, Gastrointestinal stromal tumors and Cancers of the biliary tree, including cholangiocarcinoma.

[0153] Gastrointestinal cell lineages: As used herein, unless indicated otherwise or contradictory in context, the term “gastrointestinal cell lineages” refers to gastrointestinal cells and cells of the digestive accessory organs at any stage of their development and thus include, but are not limited to interstitial cells of Cajal, gastrointestinal epithelial cells, parietal cells, acinar cells, chief cells, mucus cells, goblet cells, G cells, endocrine I cells, endocrine S cells, endocrine K cells, endocrine M cells, ECL (enterochromaffin) cells, D cells, enteroendocrine cells, APUD cells, hepatocytes, sinusoidal hepatic endothelial cells, Kupffer cells, hepatic stellate cells, centroacinar cells, pancreatic stellate cells, α-cells, γ-cells, β-cells, δ-cells, centroacinar cells, basophilic cells, ductal cells, columnar cells, cholecystocytes and any precursor cells thereof.

[0154] Lung: The lung is the essential respiration organ in many air-breathing animals. In mammals the two lungs are located near the backbone on either side of the heart. Their principal function is to transport oxygen from the atmosphere into the bloodstream, and to release carbon dioxide from the bloodstream into the atmosphere. A large surface area is needed for this exchange of gases, which is accomplished by the mosaic of specialized cells that form millions of tiny, exceptionally thin-walled air sacs called alveoli. Lung cells include, but are not limited to, type I pneumocytes, type II pneumocytes, clara cells and goblet cells. Lung tissue-related neoplastic diseases include, but are not limited to, lung cancer also known as carcinoma of the lung or pulmonary carcinoma, Epithelial cells or small-cell lung carcinoma (SCLC) and non-small-cell lung carcinoma (NSCLC).

[0155] Lung cell Lineages: As used herein, unless indicated otherwise or contradictory in context, the term “lung cell Lineage” refers to lung cells at any stage of their development and thus include, but are not limited to, epithelial cells, erythrocytes, alveolar cells and any precursor cells thereof.

[0156] Head and neck cancer: As used herein, unless indicated otherwise or contradictory in context, the term “head and neck cancer” refers to a group of cancers that usually starts in the lip, oral cavity, nasal cavity, paranasal sinuses, pharynx, and larynx. About 90% of head and neck cancers are squamous cell carcinomas. Thus, neoplastic diseases such as head and neck cancers include, but are not limited to, oral cancer, nasopharynx cancer, oropharyngeal cancer, hypopharynx cancer and laryngeal cancer.

[0157] The cell lineage involved in head and neck cancers includes all the cells involved in the formation of such cancers at any stage of their development and thus include, but are not limited to, cells of the oral cavity, cells of the pharynx, cells of the larynx, cells of the paranasal sinuses and nasal cavity, cells of the salivary glands and any precursor cells thereof.

[0158] Ratio: As used herein, unless indicated otherwise or contradictory in context, the term “ratio”, when used in relation to GFR-binding compound with respect to the bioactive carrier in the pharmaceutical association or composition disclosed herein, refers to the (molar, weight or part as specified) ratio between the quantity of GFR-binding compound and the quantity of bioactive carrier. The ratio may be a molar ratio, a weight ratio or a part ratio and will be specified as needed on a case by case basis. Quantity units may conventionally be mole, millimole, gram, milligram or parts. For example, in certain embodiments, it is convenient to express the relative quantity between GFR-binding compounds and bioactive carriers using densities. It shall be understood that this ratio may be varied according to the neoplastic cell type to be treated.

[0159] Density: As used herein, unless indicated otherwise or contradictory in context, the term “density”, when used in relation to GFR-binding compound with respect to the bioactive carrier in the pharmaceutical composition disclosed herein, refers to the quantity of GFR-binding compounds, expressed in e.g. mole, millimole, gram, or milligram, with respect to one standardised surface unit e.g. squared millimetre (mm²), squared micrometre (μm²), or squared nanometre (nm²)). For example, in certain embodiments, the ratio between a GFR-binding compound and a bioactive carrier in the pharmaceutical association or composition disclosed herein may be expressed in pmol per mm² or pmol/mm².

[0160] Cell cycle: As used herein, unless indicated otherwise or contradictory in context, the term “cell cycle” refers to the process through which a vertebrate cell self-replicate. In eukaryote cells, cell cycle consists of four discrete phases: G1, S, G2, and M. Together, the G1, S, and G2 phases make up the period known as interphase. During the S or “synthesis” phase, the cell replicates its DNA creating an exact copy of all of its chromosomes. In the M or “mitotic” phase, the cell division actually occurs and separates the chromosomes in its cell nucleus into two identical sets in two nuclei. The first phase within interphase, from the end of the previous M phase until the beginning of DNA synthesis, is called G1. During this phase the biosynthetic activities of the cell, which are considerably slowed down during M phase, resume at a high rate. This phase is marked by the formation of millions of proteins and later on enzymes that are required in S phase, mainly those needed for DNA replication. The G2 phase, or pre-mitotic phase, is the third and final sub-phase of Interphase in the cell cycle directly preceding Mitosis. It follows the successful completion of S phase and ends with the onset of prophase, the first phase of mitosis. In order to move from one phase of the cell cycle to the next, a cell must “validate” numerous checkpoints. At each checkpoint, specialized proteins determine whether the necessary conditions exist. If so, the cell is free to enter into the next phase. If not, progression through the cell cycle is halted. For example, in certain embodiments, during G1, the cell passes through a “validation” window punctuated by the restriction point R. During the “validation” phase, different checkpoints ensure that environmental conditions are favourable for replication. If conditions are not favourable, the cell may enter a resting state known as G0. The G0 phase or resting phase is a period in the cell cycle in which cells exist in a quiescent state. G0 phase is viewed as either an extended G1 phase, where the cell is neither dividing nor preparing to divide, or a distinct quiescent stage that occurs outside of the cell cycle. Typically, a healthy vertebrate cell undergoes cell division when needed e.g. to regenerate damaged tissues or simply replace old tissues by new ones, by switching from a G0 resting state into the G1 state of the cell cycle and resume cell division. In contrast, neoplastic cells (such as cancer cells) have lost their ability to suspend cell division and switch to the G0 phase therefore undergoing permanent cell division which is generally referred to uncontrolled cell division or proliferation. Another “validation” window takes place later in the cell cycle, just before a cell moves from G2 to mitosis. Here, a number of proteins scrutinize the cell's DNA ensuring proper replication has taken place. Finally, another cell cycle “validation” window takes place during mitosis in which different checkpoints determines whether chromosomes are correctly attached to the spindle, and to the network of microtubules that will separate them during cell division.

[0161] Quiescence: As used herein, unless indicated otherwise or contradictory in context, the term “quiescence”, when used in relation to a cell, refers to a resting state during which the cell does not divide, duplicate or proliferate. This state is also called the G0 state. As used herein, “inducing quiescence of a neoplastic cell” thus means to provoke the passage from G1 to G0 of a neoplastic cell which usually has lost the ability to do so. One method to detect the passage from G1 to G0 is, for instance, to monitor the state of phosphorylation of the protein Rb via Western Blot. The Rb protein is normally not phosphorylated during the G0 phase but becomes phosphorylated or even hyper-phosphorylated during the rest of the cell cycle. Consequently, observing the absence (or substantial reduction i.e. at least 90% reduction, in comparison with the quantity present in the G1 phase) of phosphorylated Rb protein on a western blot confirms that a neoplastic cell has undergone (at some point in time) a switch to the G0 phase.

[0162] Cell division or cell proliferation: As used herein, unless indicated otherwise or contradictory in context, the term “cell division” or “cell proliferation”, refers to the process by which a cell self-replicate, replicate or is caused to replicate.

[0163] Proliferate: As used herein, unless indicated otherwise or contradictory in context, the term “proliferate” means to grow, expand or increase or cause to grow, expand or increase. “Proliferative” means having the ability to proliferate. “Anti-proliferative” means having properties to counter, reduce, or inhibit proliferation.

[0164] Hyperproliferation: As used herein, unless indicated otherwise or contradictory in context, the term “hyperproliferation” or “uncontrolled proliferation” means the abnormal growth, expansion or increase or causing the abnormal growth, expansion or increase. Abnormal growth typically originates from the abnormal regulation of the cell cycle preventing the cell to reach the G0 state and stop cell division and replication. One consequence of hyper or uncontrolled proliferation is the development of neoplastic diseases such as tumours and cancers.

[0165] Hyperproliferative diseases: As used herein, unless indicated otherwise or contradictory in context, the term “hyperproliferative diseases” is used interchangeably with “neoplastic diseases” and refers to diseases that are characterized by uncontrolled cellular proliferation and/or disruption in programmed cell death. The loss of a cell's ability to control cellular proliferation is often caused by genetic damage to the cellular pathways responsible for regulating cellular functions, including but not limited to, for example, in certain embodiments, metabolism, cell cycle progression, cell adhesion, vascular function, apoptosis, and angiogenesis.

[0166] Anti-mitogen activity: As used herein, unless indicated otherwise or contradictory in context, the term “anti-mitogen activity”, refers to biological pathways that down-regulate, partially inhibit or suppress cell mitosis i.e. cell division. As used herein, a substance or pharmaceutical association which promotes, induces or favours anti-mitogen activity thus means a substance or pharmaceutical association which provides at least part of its effective biologic or therapeutic action by down-regulating, partially inhibiting or suppressing mitosis of the neoplastic cell to be treated.

[0167] Tumor suppressor pathways: As used herein, unless indicated otherwise or contradictory in context, the term “tumor suppressor pathways” refers to biological pathways that down-regulate, partially inhibit or suppress tumor activity i.e. protect the cell against cell defects which could cause tumors or cancers. As used herein, a substance or pharmaceutical association which promotes, induces or favours tumor suppressor pathways thus means a substance or pharmaceutical association which provides at least part of its effective biologic or therapeutic action by up-regulating, activating or promoting the tumor suppressor genes or proteins of the neoplastic cell to be treated. Known tumor suppressor proteins which have a dampening or repressive effect on the regulation of the cell cycle or promote apoptosis include, but are not limited to, p53, pRb, pVHL, APC, CD95, ST5, YPEL3, ST7, and ST14.

[0168] Anti-oncogenic activity: As used herein, unless indicated otherwise or contradictory in context, the term “anti-oncogenic activity” refers to any molecule having the ability to inhibit, repress or down-regulate the gene or protein expression of oncogenes. An oncogene is a gene that has the potential to cause neoplastic diseases such as cancer. Examples of anti-oncogene molecules include tumor suppressor proteins.

[0169] By “without temporarily or permanently damaging or killing a neoplastic cell”, is meant, unless indicated otherwise or contradictory in context, that a neoplastic disease, such as cancer, is treated without inducing the entry of the neoplastic cells into apoptosis as it may be assessed by the positive expression of proteins caspase 3, 6 and 7.

[0170] By “without permanently inducing a quiescent state in a neoplastic cell”, is meant, unless indicated otherwise or contradictory in context, that a neoplastic disease, such as cancer, is treated by inducing a temporary quiescent state in the neoplastic cells (the cells enter the G0 phase) and then differentiate into a more specialised state.

[0171] Non-mutagenic: As used herein, unless indicated otherwise or contradictory in context, the term “non-mutagenic”, when used in relation to a therapy or treatment, refers to a therapy which does not involve the alteration or modification of a cell's genome.

[0172] Recoding: As used herein, unless indicated otherwise or contradictory in context, the term “recoding” or “converting”, when used in relation to a cell (in particular a neoplastic cell such as a cancer cell), refers to the action of providing, to a neoplastic cell to be treated, a suitable extracellular micro-environment (e.g. in the form of a pharmaceutical association or composition as defined herein) providing appropriate extracellular signals so that the cell may undergo self-recovery or -healing and be converted into a partially or fully differentiated non-neoplastic cell.

[0173] Recoding therapy: As used herein, unless indicated otherwise or contradictory in context, the term “recoding therapy” refers to a therapy that promotes and stimulates the cell's natural abilities to redirect its own fate by integrating accurate micro-environmental recoding signals.

[0174] Extracellular micro-environment: As used herein, unless indicated otherwise or contradictory in context, the term “extracellular micro-environment” refers to the environment surrounding (in functional proximity with) a specific cell which is characterized by biophysical, mechanical and biochemical properties specific for each tissue and is able to regulate cell behavior. Modification of the extracellular micro-environment of a neoplastic cell using, for instance, pharmaceutical associations or compositions as defined herein allows for the conversion or recoding of said neoplastic cell into a healthy, functional, non-neoplastic cell.

[0175] Self-recovery or self-healing: As used herein, unless indicated otherwise or contradictory in context, the term “self-recovery” or “self-healing”, when used in relation to a neoplastic cell such as a cancer cell, means that the neoplastic cell operates its own internal biological changes once it has been recoded or treated using a pharmaceutical association or composition as defined herein, so that it becomes a functional, healthy, non-neoplastic cell. The cell heal itself when in contact with the pharmaceutical composition or association as defined herein and, in contrast with previously reported methods wherein the neoplastic cell is forced to die or maintained in a temporarily reduced or non-proliferative state.

[0176] Physiologically functional cell: As used herein, unless indicated otherwise or contradictory in context, the term “physiologically functional cell” refers to a cell which is able to perform normally all of the cell functions associated with a particular cell type and necessary for the normal physiology of a cell. These functions include all of the intracellular molecular mechanisms but also all of the activities necessary for a normal communication between the cell and its microenvironment. One method which may be used to verify if a cell is physiologically functional is the grafting of the cell, after the introduction of fluorescent markers, in other mammalian model organisms such as mouse models. The cell is grafted in the tissue corresponding to its cell type. The cell characteristics and normal functions are monitored after a period of time with various methods such as in vivo microscopy or histological staining. The term “functional” when used in relation to a molecule, compound or substance refers to a biological molecule in a form in which it exhibits a property and/or activity by which it is characterized.

[0177] Healthy cell: As used herein, unless indicated otherwise or contradictory in context, the term “healthy cell” refers to a cell which presents a normal morphology, normal cell functions and normal cell growth which are not damaged, altered or inactivated by a neoplastic disease.

[0178] Shorter period of time: As used herein, unless indicated otherwise or contradictory in context, the term “shorter period of time”, when used in relation to conversion or recoding duration, means substantially shorter to provide a substantial benefit for the treated patient in comparison with existing treatments. In certain embodiments, a shorter period of time includes at least 1.5-fold, at least 2-fold, at least 2.5-fold, at least 3-fold, at least 3.5-fold, at least 4-fold, at least 4.5-fold, at least 5-fold, at least 6-fold, at least 7-fold, at least 8-fold, at least 9-fold or at least 10-fold reduction with respect to an existing treatment.

[0179] Exogenous: As used herein, unless indicated otherwise or contradictory in context, the term “exogenous” refers to a substance coming from outside a living system such as a cell, an organ, or an individual organism. For example, in certain embodiments, exogenous factors in medicine include pathogens and therapeutics. DNA introduced into a cell via transfection or viral infection may be considered as an exogenous factor. Carcinogens are also commonly referred to as exogenous factors.

[0180] Endogenous: As used herein, unless indicated otherwise or contradictory in context, the term “endogenous” refers to substances that originate from within an organism, tissue, or cell.

[0181] Intracellular: As used herein, unless indicated otherwise or contradictory in context, the term “intracellular” generally means “inside the cell”. In vertebrates, such as animals, the cell membrane is the barrier between the inside of the cell and the outside of the cell (the extracellular milieu). Thus, treatments and therapies in which at least one substance, compound, pharmaceutical association, combination or composition penetrates the cell wall of a cell to be treated in order to produce/deliver its (effective) biological effect are considered as intracellular treatments and therapies.

[0182] Extracellular: As used herein, unless indicated otherwise or contradictory in context, the term “extracellular” means “outside the cell”. In vertebrates, such as animals, the cell membrane is the barrier between the inside of the cell (the intracellular milieu) and the outside of the cell. Thus, treatments and therapies in which no substance, compound, pharmaceutical association, combination or composition requires penetration of the cell membrane in order to produce/deliver its (effective) biological effect (e.g. by interacting with trans-membrane receptors) are considered as extracellular treatments and therapies. In other words, a therapy using a plurality of substances in order to provide the desired biological effect wherein one or more of these substances require the entry into the intracellular compartment to provide (or deliver) its biological effect is not considered as an extracellular therapy in the sense of the present disclosure.

[0183] Cytostatic: As used herein, unless indicated otherwise or contradictory in context, the term “cytostatic” refers to inhibiting, reducing, or suppressing the growth, division, or multiplication of a cell (e.g., a mammalian cell (e.g., a human cell)), bacterium, virus, fungus, protozoan, parasite, prion, or a combination thereof.

[0184] Cytotoxic: As used herein, unless indicated otherwise or contradictory in context, the term “cytotoxic” refers to killing or causing injurious, toxic, or deadly effect on a cell (e.g., a mammalian cell (e.g., a human cell)), bacterium, virus, fungus, protozoan, parasite, prion, or a combination thereof.

[0185] In vitro: As used herein, unless indicated otherwise or contradictory in context, the term “in vitro” refers to events that occur in an artificial environment, e.g., in a test tube or reaction vessel, in cell culture, in a Petri dish, etc., rather than within an organism (e.g., animal, plant, or microbe).

[0186] In vivo: As used herein, unless indicated otherwise or contradictory in context, the term “in vivo” refers to events that occur within an organism (e.g., animal, plant, or microbe or cell or tissue thereof).

[0187] Ex vivo: As used herein, unless indicated otherwise or contradictory in context, the term “ex vivo” refers to events that occur in an external environment on tissues sourced from an organism (e.g., animal, plant, or microbe) in an attempt to replicate natural living conditions outside such an organism.

[0188] Syndecans: As used herein, unless indicated otherwise or contradictory in context, the term “syndecans” refers to single transmembrane domain proteins that are thought to act as co-receptors, especially for G protein-coupled receptors. These core proteins carry three to five heparan sulfate and chondroitin sulfate chains, which allow for interaction with a large variety of ligands including fibroblast growth factors, vascular endothelial growth factor, transforming growth factor-beta, fibronectin and antithrombin-1. Interactions between fibronectin and some syndecans can be modulated by the extracellular matrix protein tenascin C. The syndecan protein family has four members. Syndecans 1 and 3 and syndecans 2 and 4, making up separate subfamilies, arose by gene duplication and divergent evolution from a single ancestral gene. The syndecan numbers reflect the order in which the cDNAs for each family member were cloned. All syndecans have an N-terminal signal peptide, an ectodomain, a single hydrophobic transmembrane domain, and a short C-terminal cytoplasmic domain. All syndecans are anchored to plasma membrane via a 24-25 amino acid long hydrophobic transmembrane domain. In mammalian cells, syndecans are expressed by unique genes located on different chromosomes. All members of the syndecan family have 5 exons. The difference in size of the syndecans is credited to the variable length of exon 3, which encodes a spacer domain. In humans, the amino acid length of syndecan 1, 2, 3 and 4 is 310, 201, 346 and 198 respectively. Glycosaminoglycan chains, a member of the heparan sulfate group, are an important component of syndecans and are responsible for a diverse set of syndecan functions. The addition of glycosaminoglycans to syndecan is controlled by a series of post-translational events.

[0189] Cyclin-dependent kinases: As used herein, unless indicated otherwise or contradictory in context, the term “Cyclin-dependent kinases” or “CDKs” refers to a family of protein involved in the regulation of the cell cycle. They are present in all known eukaryotes, and their regulatory function in the cell cycle has been evolutionarily conserved. By definition, a CDK binds a regulatory protein called a cyclin. It is reported that, without cyclin, CDK has little kinase activity; only the cyclin-CDK complex is considered to be an active kinase. CDKs phosphorylate their substrates on serines and threonines, so they can be said to belong to the serine-threonine kinase family. CDKs and cyclins are thus highly conserved across species and are present in all cell types including those having a neoplastic phenotype (e.g. cancer cells). Most of the known cyclin-CDK complexes regulate the progression through the cell cycle. Animal cells contain at least nine CDKs, four of which, CDK 1, 2, 3, 4 and 6, are reported to be directly involved in cell cycle regulation: CDK1 regulated by cyclin A, cyclin B; CDK2 regulated by cyclin A, cyclin E; CDK3 regulated by cyclin C; CDK4 regulated by cyclin D1, cyclin D2, cyclin D3; CDK5 regulated by CDK5R1, CDK5R2; CDK6 regulated by cyclin D1, cyclin D2, cyclin D3; CDK7 regulated by cyclin H; CDK8 regulated by cyclin C; CDK9 regulated by cyclin T1, cyclin T2a, cyclin T2b, cyclin K.

[0190] Cyclins: As used herein, unless indicated otherwise or contradictory in context, the term “cyclins” refers to a family of proteins that control the progression of cells through the cell cycle by activating cyclin-dependent kinase (CDK) enzymes. Cyclin D is one of the major cyclins produced in terms of its functional importance. It is known to interact with four CDKs: CDK2, 4, 5, and 6. In proliferating cells, cyclin D-CDK4/6 complex accumulation is of great importance for cell cycle progression. For instance, cyclin D-CDK4/6 complexes partially phosphorylates retinoblastoma tumor suppressor protein (Rb), whose inhibition can induce expression of some genes important for S phase progression.

[0191] Patient/subject: As used herein, unless indicated otherwise or contradictory in context, the term “patient” or “subject”, which are used interchangeably, refers to any organism to which a composition in accordance with the invention may be administered, e.g., for experimental, diagnostic, prophylactic, and/or therapeutic purposes. Typical subjects include animals (e.g., mammals such as mice, rats, rabbits, non-human primates, and humans) and/or plants. As used herein, patients/subjects include those individuals who may seek or be in need of treatment, requires treatment, is receiving treatment, will receive treatment, or a subject who is under care by a trained professional for a particular disease or condition.

[0192] Purified: As used herein, unless indicated otherwise or contradictory in context, the term “purify,” “purified,” “purification” means to make substantially pure or clear from unwanted components, material defilement, admixture or imperfection.

[0193] Targeted Cells: As used herein, unless indicated otherwise or contradictory in context, the term “targeted cells” refers to any one or more cells of interest. The cells may be found in vitro, in vivo, in situ or in the tissue or organ of an organism. The organism may be an animal, preferably a mammal, more preferably a human and most preferably a patient.

[0194] Molecule length: As used herein, unless indicated otherwise or contradictory in context, the term molecule or peptide “length” or “size” means the longest 2D or 3D distance which may possibly be measured within the molecule. For cyclic molecules, “length” or “size” means the longest measurable distance across the cyclic structure. Throughout the present disclosure, when a molecule size or length is given (in general using the nanometre, nm, unit), the following procedures were used to calculate them:
[0195] The so-called «2D» procedure: a 2D chemical structure was drawn in e.g. the ChemDraw® Software. Then, size measurement was carried out via the available ChemDraw length measurement tools. The length value given herein corresponds to the longest 2D length of the molecule using the default settings 2D bond sizes and angles of the software.
[0196] Alternatively, the so-called “3D” procedure may be followed:
[0197] (1) Drawing of the chemical structure of the molecule using suitable softwares (such as ChemDraw).
[0198] (2) Creating a 3D structure model of the molecule hereby drawn using SCWRL (Protein Sci. 2003; 12(9):2001-14) or MODELLER (Current Protocols in Bioinformatics. 15:5.6:5.6.1-5.6.30), each of which is hereby incorporated by reference in its entirety.
[0199] (3) Incubating the obtained 3D structure model in a box simulation containing water for few milliseconds using AMBER (J. Computat. Chem. 2005; 26, 1668-1688), which is hereby incorporated by reference in its entirety.
[0200] (4) Measuring the size of the molecule hereby obtained using softwares such as Pymol® using available Pymol length measurement tools (DeLano Scientific LLC, www.pymol.org).

[0201] Root Mean Square Deviation: As used herein, unless indicated otherwise or contradictory in context, the term “Root Mean Square Deviation” or “RMSD” is well known in the art and means the square root of the arithmetic mean of the square of the distances between certain matched atoms. One can represent a molecular conformation as a vector whose components are the Cartesian coordinates of the molecule's atoms. Therefore, a conformation for a molecule with N atoms can be represented as a 3N-dimensional vector of real numbers. To calculate the RMSD of a pair of peptides or peptidomimetics (e.g. x and y), each one of them must be represented as a 3N-length (assuming N atoms) vector of coordinates. The RMSD is therefore the square root of the arithmetic mean of the square of the distances between corresponding atoms of x and y. It is a measure of the average atomic displacement between the conformations of the two structures:

$$\sqrt{\frac{1}{N} {\sum }_{i = 1}^{N} \vert xi - yi \vert {1}^{2}}$$

[0202] In other words, the RMSD is the measure of the average distance between the atoms (usually the backbone atoms) of superimposed polypeptides or peptidomimetics. In the study of globular protein conformations, one customarily measures the similarity in three-dimensional structure by the RMSD of the Ca atomic coordinates after optimal rigid body superposition.

[0203] The RMSD value of a given peptide or peptidomimetic with respect to a specifically selected reference structure (hereinafter may also be referred to as “PEPREF”) may be calculated using various methods all well know by the skilled person. However, for the purpose of the present disclosure and for the avoidance of doubts, the RMSD of a given peptide or peptidomimetic as used in the present disclosure is obtained precisely using the following procedure:

STEP 1: Creating a 3-dimensional model of (i.e. obtaining 3D structure coordinates for) a peptide or peptidomimetic for which the RMSD is to be calculated, by:
STEP 1.1: Obtaining a set of polypeptide 3D structure coordinates based on the alignment with the sequence of a peptide or peptidomimetic for which the RMSD value is to be calculated, using the BLAST algorithm according to the following procedure:
[0204] 1. Open the following link to access the “Standard Protein Blast” tool: blast.ncbi.nlm.nih.gov/Blast.cgi?PROGRAM=blastp&PAGE_TYPE=BlastSearch&LINK_LOC=blasthome
[0205] 2. Enter the amino acid sequence of the peptide or peptidomimetic of interest in the “Enter Query Sequence” section. The alignment is performed one sequence after the other (this is not a multiple alignment tool).
[0206] 3. In the section “Choose Search Set”, choose the following database: Protein Data Bank Proteins (pdb).
[0207] 4. In the section “Choose Search Set”, do not exclude «Models (XM/XP)» and do not Exclude «Uncultured/environmental sample sequences».
[0208] 5. In the section “Program Selection”, choose the following algorithm: blastp (protein-protein BLAST)
[0209] 6. Leave other fields as shown on the screenshot in FIG. 20.
[0210] 7. Run BLAST.
[0211] 8. The results obtained from the query are presented in the form of several pdb files.
[0212] 9. From this output results, the first ten (10) PDB files corresponding to the best sequence alignments are retained. This set of 10 PDB files or structures will be used in the next step (Step 2: structural alignments with STAMP).
[0213] 10. Finally, clean up the 10 structures contained in the 10 PDB files by removing all e.g. additional small molecules, receptors or portions thereof, dimers or portions thereof, so as to retain only the polypeptide chain of interest.

[0214] The set of pdf files contains the polypeptide 3D structure coordinates of the 10 structures having the highest sequence homology with the peptide or peptidomimetic for which the RMSD value is to be calculated.

STEP 1.2: Performing the structural alignment of the set of 3D structure coordinates obtained in STEP 1.1, thereby obtaining a set of aligned polypeptide 3D structure coordinates, by using STAMP (Structural Alignment of Multiple Proteins Version 4.2) according to the following procedure:
[0215] 1. Open the following link to access the “STAMP superposition” tool: www.russelliab.org/cgi-bin/pdc/stamp.pl
[0216] 2. In the section entitled “Structure A”, input the PDB file corresponding to the first structure from the set of ten 3D structure coordinates obtained in STEP 1.1, which corresponds to the best sequence alignment with BLAST.
[0217] 3. In the section entitled “Structure B”, input the PDB file corresponding to the second structure from the set of ten 3D structure coordinates obtained in STEP 1.1, which corresponds to the second best sequence alignment with BLAST.
[0218] 4. Run STAMP.
[0219] 5. Repeat steps 2 to 4 with the other eight pdb files from the set of ten 3D structure coordinates identified in STEP 1.1 by successively entering the PDB files in the field “Structure B”.
[0220] 6. As a result, the structural alignment of the 10 structures contained in the set of PDB files obtained in STEP 1.1 is obtained in the form of 9 distinct PDB files each containing a pair of aligned polypeptide 3D structure (structure 1 with structure 2, structure 1 with structure 3, structure 1 with structure 4, . . . , structure 1 with structure 10).
[0221] 7. From these 9 “pair” PDB files, 10 PDB files each containing one of structures 1 to 10 are created.
[0222] 8. 10 PDB files containing the aligned 3D structure coordinates are thus obtained from STEP 1.2. for use in the next step.
   STEP 1.3: Modelling the sequence of peptide or peptidomimetic for which the RMSD value is to be calculated against the set of aligned polypeptide 3D structure coordinates obtained in STEP 1.2, thereby obtaining a set of 3D structure coordinates for the peptide or peptidomimetic for which the RMSD value is to be calculated, using SCWRL (reference: “SCWRL and MollDE: computer programs for side-chain conformation prediction and homology modeling”, Nature Protocols VOL. 3 NO. 12 2008, Qiang Wang et al.; which is hereby incorporated by reference in its entirety) according to the following procedure:
[0223] 1. Insert the input sequence of a peptide or peptidomimetic for which the RMSD value is to be calculated in Fasta format.
[0224] 2. Import the first PDB file containing the aligned polypeptide 3D structure coordinates obtained in STEP 1.2.
[0225] 3. Run SCWRL by typing the following command for Unix based systems: “scwrl_path/scwrl3 -i inputpdbfile -o outputpdbfile -s sequencefile 4 logfile”.
[0226] 4. As a result, a first PBD file is obtained containing the predicted 3D structure coordinates of the peptide or peptidomimetic for which the RMSD value is to be calculated.
[0227] 5. Repeat steps 1 to 3 using the 9 remaining PDB files obtained in STEP 1.2.
[0228] 6. 10 PDB files are obtained from STEP 1.3 for use in the following STEP 1.4.
   STEP 1.4: Minimizing the free energy (ΔG) of the set of 3D structure coordinates for the peptide or peptidomimetic for which the RMSD value is to be calculated obtained in STEP 1.3 using GROMACS (Reference: Hess B, Kutzner C, Van Der Spoel D, Lindahl E (2008). “GROMACS 4: Algorithms for Highly Efficient, Load-Balanced, and Scalable Molecular Simulation”. J Chem Theory Comput 4 (2): 435; which is hereby incorporated by reference in its entirety) according to the following procedure:
[0229] 1. Create a Gromacs topology (gmx) file from the first PDB file of the modeled peptide or peptidomimetic for which the RMSD value is to be calculated obtained in STEP 1.3, by using the command «pdb2gmx -f NOMDUFICHIERPDB.pdb -water spc». “NOMDUFICHIERPDB” is the name of the input PDB file.
[0230] 2. Create a box around the imported modeled peptide or peptidomimetic by using the command «editconf -f conf.gro -bt cubic d 0.7 o box.gro».
[0231] 3. Add solvent (water) molecules into the box by using the command «genbox -cp box.gro -cs spc216.gro -p topol.top - o solvated.gro».
[0232] 4. Prepare the input for the molecular dynamics (MD) run with the command «vim em.mdp». Default run is set to 1000 nsteps.
[0233] 5. Create an input for the MD run by using the command «grompp -f em.mdp -p topol.top -c solvated.gro -o em.tpr».
[0234] 6. Run the command «mdrun -v -deffnm em» to perform the actual energy minimization.
[0235] 7. Run the command «g energy -f em.edr -s em.tpr -o em.xvg» and then run option «7».
[0236] 8. As a result, a first XMG file is obtained. To view the XMG file run the command «xmgrace em.xvg».
[0237] 9. Repeat steps 1 to 8 with the 9 remaining structures obtained in STEP 1.3. 10 XMG files are thus obtained.
[0238] 10. The structure of lowest energy is obtained from each XMG file in the form of a PDB file. 10 PDB files each containing one structure of lowest energy are thus obtained from STEP 1.4 for use in the next step.
   STEP 2: Calculating the RMSD of the peptide or peptidomimetic for which the RMSD value is to be calculated by comparing the 3D structure coordinates of the peptide or peptidomimetic obtained in STEP 1.4 with the 3D structure coordinates of PEPREF to obtain the lowest possible RMSD value using FATCAT (Flexible structure AlignmenT by Chaining Aligned fragment pairs allowing Twists) according to the following procedure:
[0239] 1. Open the following link to access the “FATCAT” software: fatcat.burnham.org
[0240] 2. Open the “pairwise alignment” tool.
[0241] 3. Import the PDB file containing the structure coordinates of PEPREF in the “Get the 1st structure” section.
[0242] 4. Import the first PDB file of the peptide or peptidomimetic for which the RMSD value is to be calculated with minimized energy obtained in STEP 1.4.
[0243] 5. Run FATCAT.
[0244] 6. As a result, a first RMSD value of the first structure of the peptide or peptidomimetic for which the RMSD value is to be calculated as obtained in STEP 1.4 will be obtained in the output report.
[0245] 7. Repeat steps 1 to 5 with the 9 remaining structures (PDB files) obtained from STEP 1.4.
[0246] 8. The peptide or peptidomimetic structure with the lowest RMSD (out of the ten RMSD values successively obtained) is the value taken into account in the present application.

[0247] 3D structure coordinates of PEPREF: As used herein, unless indicated otherwise or contradictory in context, the 3D structure coordinates of PEPREF are as follows:

| | | | | | | | | |
|---|---|---|---|---|---|---|---|---|
| ATOM | 511 | N | LYS | A | 1 | −14.570 | 46.437 | 27.424 |
| ATOM | 512 | CA | LYS | A | 1 | −13.512 | 45.748 | 28.151 |
| ATOM | 513 | C | LYS | A | 1 | −13.655 | 44.259 | 27.884 |
| ATOM | 514 | O | LYS | A | 1 | −12.769 | 43.463 | 28.197 |
| ATOM | 515 | CB | LYS | A | 1 | −13.605 | 46.029 | 29.652 |
| ATOM | 516 | CG | LYS | A | 1 | −13.640 | 47.509 | 29.991 |
| ATOM | 517 | CD | LYS | A | 1 | −12.615 | 48.297 | 29.183 |
| ATOM | 518 | CE | LYS | A | 1 | −12.625 | 49.768 | 29.575 |
| ATOM | 519 | NZ | LYS | A | 1 | −13.994 | 50.369 | 29.497 |
| ATOM | 520 | N | ILE | A | 2 | −14.792 | 43.890 | 27.309 |
| ATOM | 521 | CA | ILE | A | 2 | −15.051 | 42.499 | 26.967 |
| ATOM | 522 | C | ILE | A | 2 | −14.911 | 42.370 | 25.444 |
| ATOM | 523 | O | ILE | A | 2 | −15.531 | 43.125 | 24.683 |
| ATOM | 524 | CB | ILE | A | 2 | −16.466 | 42.065 | 27.401 |
| ATOM | 525 | CG1 | ILE | A | 2 | −16.630 | 42.238 | 28.915 |
| ATOM | 526 | CG2 | ILE | A | 2 | −16.710 | 40.629 | 26.985 |
| ATOM | 527 | CD1 | ILE | A | 2 | −15.631 | 41.478 | 29.30 |
| ATOM | 528 | N | PRO | A | 3 | −14.085 | 41.411 | 24.989 |
| ATOM | 529 | CA | PRO | A | 3 | −13.789 | 41.109 | 23.588 |
| ATOM | 530 | C | PRO | A | 3 | −14.998 | 40.695 | 22.768 |
| ATOM | 531 | O | PRO | A | 3 | −15.969 | 40.164 | 23.305 |
| ATOM | 532 | CB | PRO | A | 3 | −12.785 | 39.968 | 23.688 |
| ATOM | 533 | CG | PRO | A | 3 | −12.156 | 40.166 | 25.007 |
| ATOM | 534 | CD | PRO | A | 3 | −13.330 | 40.506 | 25.867 |
| ATOM | 535 | N | LYS | A | 4 | −14.937 | 40.937 | 21.463 |
| ATOM | 536 | CA | LYS | A | 4 | −16.023 | 40.529 | 20.590 |
| ATOM | 537 | C | LYS | A | 4 | −15.886 | 39.015 | 20.391 |
| ATOM | 538 | O | LYS | A | 4 | −14.903 | 38.415 | 20.831 |
| ATOM | 539 | CB | LYS | A | 4 | −15.926 | 41.244 | 19.245 |
| ATOM | 540 | CG | LYS | A | 4 | −15.802 | 42.751 | 19.355 |
| ATOM | 541 | CD | LYS | A | 4 | −16.292 | 43.433 | 18.083 |
| ATOM | 542 | CE | LYS | A | 4 | −16.162 | 44.943 | 18.177 |
| ATOM | 543 | NZ | LYS | A | 4 | −16.825 | 45.628 | 17.019 |
| ATOM | 544 | N | ALA | A | 5 | −16.85 | 38.393 | 19.759 |
| ATOM | 545 | CA | ALA | A | 5 | −16.811 | 36.955 | 19.507 |
| ATOM | 546 | C | ALA | A | 5 | −15.772 | 36.771 | 18.416 |
| ATOM | 547 | O | ALA | A | 5 | −15.727 | 37.534 | 17.455 |
| ATOM | 548 | CB | ALA | A | 5 | −18.168 | 36.419 | 19.043 |
| ATOM | 549 | N | CYS | A | 6 | −14.935 | 35.756 | 18.562 |
| ATOM | 550 | CA | CYS | A | 6 | −13.887 | 35.518 | 17.584 |
| ATOM | 551 | C | CYS | A | 6 | −14.347 | 34.765 | 16.338 |
| ATOM | 552 | O | CYS | A | 6 | −15.327 | 34.018 | 16.368 |
| ATOM | 553 | CB | CYS | A | 6 | −12.743 | 34.768 | 18.241 |
| ATOM | 554 | SG | CYS | A | 6 | −11.198 | 34.959 | 17.353 |
| ATOM | 555 | N | CYS | A | 7 | −13.623 | 34.973 | 15.243 |
| ATOM | 556 | CA | CYS | A | 7 | −13.931 | 34.328 | 13.969 |
| ATOM | 557 | C | CYS | A | 7 | −13.091 | 33.071 | 13.798 |
| ATOM | 558 | O | CYS | A | 7 | −11.961 | 33.123 | 13.302 |
| ATOM | 559 | CB | CYS | A | 7 | −13.653 | 35.290 | 12.824 |
| ATOM | 560 | SG | CYS | A | 7 | −13.930 | 34.633 | 11.154 |
| ATOM | 561 | N | VAL | A | 8 | −13.654 | 31.941 | 14.209 |
| ATOM | 562 | CA | VAL | A | 8 | −12.949 | 30.684 | 14.110 |
| ATOM | 563 | C | VAL | A | 8 | −13.653 | 29.733 | 13.157 |
| ATOM | 564 | O | VAL | A | 8 | −14.759 | 30.016 | 12.687 |
| ATOM | 565 | CB | VAL | A | 8 | −12.814 | 30.038 | 15.492 |
| ATOM | 566 | CG1 | VAL | A | 8 | −11.807 | 30.825 | 16.337 |
| ATOM | 567 | CG2 | VAL | A | 8 | −14.161 | 30.006 | 16.170 |
| ATOM | 568 | N | PRO | A | 9 | −13.003 | 28.601 | 12.828 |
| ATOM | 569 | CA | PRO | A | 9 | −13.593 | 27.615 | 11.918 |
| ATOM | 570 | C | PRO | A | 9 | −14.726 | 26.886 | 12.631 |
| ATOM | 571 | O | PRO | A | 9 | −14.581 | 26.476 | 13.780 |
| ATOM | 572 | CB | PRO | A | 9 | −12.423 | 26.676 | 11.601 |
| ATOM | 573 | CG | PRO | A | 9 | −11.204 | 27.487 | 11.925 |
| ATOM | 574 | CD | PRO | A | 9 | −11.620 | 28.226 | 13.163 |
| ATOM | 575 | N | THR | A | 10 | −15.847 | 26.721 | 11.942 |
| ATOM | 576 | CA | THR | A | 10 | −16.999 | 26.060 | 12.527 |
| ATOM | 577 | C | THR | A | 10 | −17.334 | 24.767 | 11.804 |
| ATOM | 578 | O | THR | A | 10 | −18.097 | 23.943 | 12.303 |
| ATOM | 579 | CB | THR | A | 10 | −18.211 | 27.010 | 12.523 |
| ATOM | 580 | OG1 | THR | A | 10 | −18.491 | 27.445 | 11.185 |
| ATOM | 581 | CG2 | THR | A | 10 | −17.902 | 28.230 | 13.375 |
| ATOM | 582 | N | GLU | A | 11 | −16.750 | 24.586 | 10.627 |
| ATOM | 583 | CA | GLU | A | 11 | −16.980 | 23.377 | 9.848 |
| ATOM | 584 | C | GLU | A | 11 | −15.643 | 22.935 | 9.246 |
| ATOM | 585 | O | GLU | A | 11 | −15.029 | 23.666 | 8.464 |
| ATOM | 586 | CB | GLU | A | 11 | −17.981 | 23.624 | 8.715 |
| ATOM | 587 | CG | GLU | A | 11 | −19.421 | 23.807 | 9.163 |
| ATOM | 588 | CD | GLU | A | 11 | −19.686 | 25.166 | 9.770 |
| ATOM | 589 | OE1 | GLU | A | 11 | −19.478 | 26.175 | 9.073 |
| ATOM | 590 | OE2 | GLU | A | 11 | −20.111 | 25.227 | 10.939 |
| ATOM | 591 | N | LEU | A | 12 | −15.183 | 21.749 | 9.622 |
| ATOM | 592 | CA | LEU | A | 12 | −13.923 | 21.254 | 9.104 |
| ATOM | 593 | C | LEU | A | 12 | −14.062 | 19.912 | 8.386 |
| ATOM | 594 | O | LEU | A | 12 | −15.136 | 19.299 | 8.359 |
| ATOM | 595 | CB | LEU | A | 12 | −12.893 | 21.144 | 10.230 |
| ATOM | 596 | CG | LEU | A | 12 | −12.660 | 22.422 | 11.054 |
| ATOM | 597 | CD1 | LEU | A | 12 | −13.475 | 22.350 | 12.337 |
| ATOM | 598 | CD2 | LEU | A | 12 | −11.181 | 22.586 | 11.399 |
| ATOM | 599 | N | SER | A | 13 | −12.971 | 19.476 | 7.771 |
| ATOM | 600 | CA | SER | A | 13 | −12.964 | 18.218 | 7.046 |
| ATOM | 601 | C | SER | A | 13 | −11.568 | 17.628 | 7.164 |
| ATOM | 602 | O | SER | A | 13 | −10.613 | 18.320 | 7.550 |
| ATOM | 603 | CB | SER | A | 13 | −13.346 | 18.435 | 5.578 |
| ATOM | 604 | OG | SER | A | 13 | −12.404 | 19.261 | 4.923 |
| ATOM | 605 | N | ALA | A | 13 | −11.449 | 16.352 | 6.818 |
| ATOM | 606 | CA | ALA | A | 13 | −10.179 | 15.665 | 6.949 |
| ATOM | 607 | C | ALA | A | 13 | −9.421 | 15.471 | 5.652 |
| ATOM | 608 | O | ALA | A | 13 | −9.941 | 15.720 | 4.563 |
| ATOM | 609 | CB | ALA | A | 13 | −10.413 | 14.306 | 7.626 |
| ATOM | 610 | N | ILE | A | 14 | −8.171 | 15.046 | 5.783 |
| ATOM | 611 | CA | ILE | A | 14 | −7.343 | 14.746 | 4.623 |
| ATOM | 612 | C | ILE | A | 14 | −6.475 | 13.559 | 5.004 |
| ATOM | 613 | O | ILE | A | 14 | −6.212 | 13.316 | 6.183 |
| ATOM | 614 | CB | ILE | A | 14 | −6.401 | 15.916 | 4.183 |
| ATOM | 615 | CG1 | ILE | A | 14 | −5.284 | 16.106 | 5.200 |
| ATOM | 616 | CG2 | ILE | A | 14 | −7.188 | 17.211 | 3.982 |
| ATOM | 617 | CD1 | ILE | A | 14 | −4.173 | 16.973 | 4.696 |
| ATOM | 618 | N | SER | A | 15 | −6.045 | 12.806 | 3.999 |
| ATOM | 619 | CA | SER | A | 15 | −5.187 | 11.662 | 4.242 |
| ATOM | 620 | C | SER | A | 15 | −3.740 | 12.089 | 4.217 |
| ATOM | 621 | O | SER | A | 15 | −3.360 | 13.020 | 3.508 |
| ATOM | 622 | CB | SER | A | 15 | −5.416 | 10.584 | 3.185 |
| ATOM | 623 | OG | SER | A | 15 | −6.667 | 9.971 | 3.401 |
| ATOM | 624 | N | MET | A | 16 | −2.933 | 11.409 | 5.012 |
| ATOM | 625 | CA | MET | A | 16 | −1.518 | 11.700 | 5.047 |
| ATOM | 626 | C | MET | A | 16 | −0.778 | 10.414 | 5.244 |
| ATOM | 627 | O | MET | A | 16 | −1.137 | 9.594 | 6.078 |
| ATOM | 628 | CB | MET | A | 16 | −1.170 | 12.694 | 6.164 |
| ATOM | 629 | CG | MET | A | 16 | −1.848 | 14.042 | 5.974 |
| ATOM | 630 | SD | MET | A | 16 | −1.017 | 15.431 | 6.760 |
| ATOM | 631 | CE | MET | A | 16 | −0.799 | 14.823 | 8.475 |
| ATOM | 632 | N | LEU | A | 17 | 0.238 | 10.231 | 4.426 |
| ATOM | 633 | CA | LEU | A | 17 | 1.077 | 9.065 | 4.508 |
| ATOM | 634 | C | LEU | A | 17 | 2.289 | 9.610 | 5.264 |
| ATOM | 635 | O | LEU | A | 17 | 2.939 | 10.565 | 4.818 |
| ATOM | 636 | CB | LEU | A | 17 | 1.461 | 8.608 | 3.100 |
| ATOM | 637 | CG | LEU | A | 17 | 2.324 | 7.355 | 2.955 |
| ATOM | 638 | CD1 | LEU | A | 17 | 1.553 | 6.145 | 3.445 |
| ATOM | 639 | CD2 | LEU | A | 17 | 2.723 | 7.190 | 1.492 |
| ATOM | 640 | N | TYR | A | 18 | 2.581 | 9.029 | 6.418 |
| ATOM | 641 | CA | TYR | A | 18 | 3.706 | 9.501 | 7.196 |
| ATOM | 642 | C | TYR | A | 18 | 4.434 | 8.333 | 7.835 |
| ATOM | 643 | O | TYR | A | 18 | 4.081 | 7.186 | 7.603 |
| ATOM | 644 | CB | TYR | A | 18 | 3.222 | 10.458 | 8.281 |
| ATOM | 645 | CG | TYR | A | 18 | 2.386 | 9.782 | 9.346 |
| ATOM | 646 | CD1 | TYR | A | 18 | 1.029 | 9.527 | 9.147 |
| ATOM | 647 | CD2 | TYR | A | 18 | 2.961 | 9.379 | 10.550 |
| ATOM | 648 | CE1 | TYR | A | 18 | 0.273 | 8.894 | 10.128 |
| ATOM | 649 | CE2 | TYR | A | 18 | 2.218 | 8.745 | 11.526 |
| ATOM | 650 | CZ | TYR | A | 18 | 0.877 | 8.508 | 11.317 |
| ATOM | 651 | OH | TYR | A | 18 | 0.134 | 7.922 | 12.318 |
| ATOM | 652 | N | LEU | A | 19 | 5.439 | 8.651 | 8.650 |
| ATOM | 653 | CA | LEU | A | 19 | 6.255 | 7.661 | 9.347 |
| ATOM | 654 | C | LEU | A | 19 | 6.210 | 7.946 | 10.847 |
| ATOM | 655 | O | LEU | A | 19 | 6.685 | 8.992 | 11.288 |
| ATOM | 656 | CB | LEU | A | 19 | 7.701 | 7.763 | 8.871 |
| ATOM | 657 | CG | LEU | A | 19 | 7.901 | 7.850 | 7.359 |
| ATOM | 658 | CD1 | LEU | A | 19 | 9.300 | 8.379 | 7.039 |
| ATOM | 659 | CD2 | LEU | A | 19 | 7.669 | 6.482 | 6.748 |

[0248] Structure coordinates: As used herein, unless indicated otherwise or contradictory in context, the “structure coordinates” refers to Cartesian coordinates derived from mathematical equations related to the patterns obtained on diffraction of a monochromatic beam of X-rays by the atoms (scattering centers) of a protein, protein complex or peptide in crystal form. The diffraction data are used to calculate an electron density map of the repeating unit of the crystal. The electron density maps are then used to establish the positions of the individual atoms of the molecule or molecular complex.

[0249] STAMP: STAMP (Structural Alignment of Multiple Proteins) is a tool for aligning protein sequences based on a three-dimensional structure. Its algorithm minimizes the Ca distance between aligned residues of each molecule by applying globally optimal rigid-body rotations and translations. This program provides some information on the equivalence of the residues between the selected models.

[0250] SCWRL: This program predicts and optimizes the protein side-chain conformations. It is using the backbone of a support protein and a backbone-dependent rotamer library. The possible conformations are explored by minimizing the steric hindrance between the side-chains and between the side-chains and the backbone.

[0251] GROMACS: GROMACS is a molecular dynamics package. The “gmx rms” tool included in GROMACS compares two structures by computing the root mean square deviation (RMSD).

[0252] For the avoidance of doubts, the term “pharmaceutical association” or “pharmaceutical combination” as used herein refers to a compound or substance comprising at least two components, i.e. a (modified) GFR-binding compound and a bioactive carrier, linked, connected or bound through at least one covalent or non-covalent link, connection or bond.

[0253] In one aspect, the present disclosure provides for non-mutagenic extracellular therapies having the ability to direct cell fate. It is thus possible to convert or recode a neoplastic cell by modifying its surrounding extracellular micro-environment, in-vitro, ex-vivo or in-vivo, so that the cell operates self-recovery or self-healing and a subject possessing such a neoplastic cell may be protected from a neoplastic disease.

[0254] In one example, a neoplastic cell may operate self-recovery or self-healing e.g. by inducing a quiescence state so that the neoplastic cell may remain inactive or dormant for seconds, minutes, hours, days, weeks, months or years, in particular, will never resume neoplasia; and/or by preventing, reducing or suppressing cell division and/or cell proliferation, preferably uncontrolled cell division and/or cell proliferation of said neoplastic cell; and/or by regulating or promoting anti-mitogen activity and/or tumour suppressor pathways and/or anti-oncogenic activity in said neoplastic cell; and/or by inducing cytostaticity and not cytotoxicity in the neoplastic cell; and/or by inducing differentiation; and/or by regulating and/or modulating the adhesion or interactions between the cell and its micro-environment (i.e. the surrounding ECM) so as activate, reactivate or restore cell adhesion checkpoints in said neoplastic cell.

[0255] In one aspect, the present disclosure provides a pharmaceutical association or combination having the ability to convert or recode, extracellularly, a neoplastic cell, in-vitro, ex-vivo or in-vivo, so that it may be used in the treatment, prevention and/or diagnostic of a neoplastic disease, said association comprising at least one growth factor receptor-binding compound which activates at least one growth factor receptor of a neoplastic cell and at least one bioactive carrier which forms at least one covalent or non-covalent association with said at least one growth factor receptor-binding compound, and wherein said association reduces or suppresses (i) the gene expression of at least one cyclin D in the neoplastic cell and/or (ii) reduces or suppresses the formation of at least one complex formed between said at least one cyclin D and at least one of cyclin dependent-kinase (CDK) 4 or 6 in the neoplastic cell.

### II. Growth Factor Receptor-Binding Compounds

[0256] In one aspect, the present disclosure provides for pharmaceutical associations or combinations comprising at least one growth factor receptor-binding compound as defined herein and a bioactive carrier as defined herein, said associations or combinations having the ability to convert or recode a neoplastic cell into a non-neoplastic cell.

[0257] As used herein, the term “Growth factor receptor-binding compound” or “GFR-binding compound” refers to an exogenous or endogenous compound, molecule or substance (a) having an (binding) affinity for a growth factor receptor as defined herein, (b) comprising the ability to associate or combine with a bioactive carrier as defined herein, and (c) comprising the ability to activate a growth factor receptor as defined herein.

[0258] There are many ways to test, measure and present the binding affinity of a given substance for a given receptor, but for the purpose of the present disclosure, and for the avoidance of any doubts, the (binding) affinity values of a given GFR-binding compound to a given GFR are provided using the method of fluorescence anisotropy. In this method, a GFR-binding compound is fluorescently labelled using technics well established in the art. Binding of the resulting labelled compound to a growth factor receptor results in a fluctuation of fluorescence anisotropy which is used to construct an affinity binding curve from which the GFR-binding compound binding affinity value is derived. Using this technique, binding affinity values are given in the form of dissociation constants Kd. In certain embodiments, GFR-binding compounds of the present disclosure have Kd values as measured by fluorescence anisotropy of more than 1 (one) picomolar (pM). In certain embodiments, GFR-binding compounds of the present disclosure have Kd values as measured by fluorescence anisotropy of more than 1 (one) nanomolar (nM). In certain embodiments, GFR-binding compounds of the present disclosure have Kd values as measured by fluorescence anisotropy of more than 10 (ten) nanomolar (nM). In certain embodiments, GFR-binding compounds of the present disclosure have Kd values as measured by fluorescence anisotropy of more than 100 (one hundred) nanomolar (nM). In certain embodiments, GFR-binding compounds of the present disclosure have Kd values as measured by fluorescence anisotropy of more than 1 (one) micromolar (μM). In certain embodiments, GFR-binding compounds of the present disclosure have Kd values as measured by fluorescence anisotropy of more than 10 (ten) micromolar (μM). In certain embodiments, GFR-binding compounds of the present disclosure have Kd values as measured by fluorescence anisotropy of more than 100 (one hundred) micromolar (μM).

[0259] There are many ways to test and measure the ability of a given substance to activate a given receptor, but for the purpose of the present disclosure, and for the avoidance of any doubts, a given GFR-binding compound activates a growth factor receptor if it induces growth factor receptor phosphorylation as measured by the western blot method. There are many distinct phosphorylation sites on growth factor receptors and they may widely vary according to the type of growth factor receptor as reported in the published scientific article from Mark A. Lemmon and Joseph Schlessinger, “Cell Signaling by Receptor Tyrosine Kinases”, Cell. 2010; 141(7), 1117-1134, which is hereby incorporated by reference in its entirety.

[0260] A GFR-binding compound is said to possess the ability to associate or combine with a bioactive carrier if it comprises a functional chemical element, function or group allowing for the covalent or non-covalent assembly of the GFR-binding compound and the bioactive carrier. Such a functional chemical element, function or group, also referred to as a bioactive carrier-affinity-containing group or bioactive carrier-high-affinity-containing group, include, but is not limited to, a thiol-containing compound, a cysteine-containing compound, a cysteine, or a GTPGP or a WWFWG peptide fragment.

[0261] Growth factor receptor: As used herein, unless indicated otherwise or contradictory in context, the term “growth factor receptor” or “GFR” is a receptor which binds to growth factors which are naturally occurring substances capable of stimulating, for instance, cellular growth, proliferation, healing, and cellular differentiation. Suitable as growth factor receptors for implementing embodiments of the present invention include epidermal growth factor receptors (EGFR), fibroblast growth factor receptors (FGFR), vascular endothelial growth factor receptors (VEGFR), nerve growth factor receptors (NGFR), Insulin receptor family, Trk receptor family, Eph receptor family, AXL receptor family, LTK receptor family, TIE receptor family, ROR receptor family, DDR receptor family, RET receptor family, KLG receptor family, RYK receptor family, MuSK receptor family, hepatocyte growth factor receptors (HGFR), somatomedin or insulin-like growth factor receptors (SGFR), platelet-derived growth factor receptors (PDGFR), transforming growth factor beta (TGF-β) superfamily proteins such as AMH, ARTN, BMP10, BMP15, BMP2, BMP3, BMP4, BMP5, BMP6, BMP7, BMP8A, BMP8B, GDF1, GDF10, GDF11, GDF15, GDF2, GDF3, GDF3A, GDF5, GDF6, GDF7, GDF8, GDF9, GDNF, INHA, INHBA, INHBB, INHBC, INHBE, LEFTY1, LEFTY2, MSTN, NODAL, NRTN, PSPN, TGFB1, TGFB2 and TGFB3, and any combination thereof.

[0262] Growth factor: As used herein, unless indicated otherwise or contradictory in context, the term “growth factor” refers to any substance(s) having the ability to bind to a growth factor receptor and produce (a) biological effect(s) or reaction(s), such as promoting the growth of tissues, by activating such a growth factor receptor. Exemplary growth factors include, but are not limited to, platelet-derived growth factor (PDGF), platelet-derived angiogenesis factor (PDAF), vascular endothelial growth factor (VEGF), platelet-derived epidermal growth factor (PDEGF), transforming growth factor beta (TGF-β), transforming growth factor A (TGF-A), epidermal growth factor (EGF), fibroblast growth factor (FGF), acidic fibroblast growth factor (FGF-A), basic fibroblast growth factor (FGF-B), insulin-like growth factors 1 and 2 (IGF-I and IGF-2), keratinocyte growth factor (KGF), tumor necrosis factor (TNF), fibroblast growth factor (FGF) and interleukin-1 (IL-1), Keratinocyte Growth Factor-2 (KGF-2), and combinations thereof.

[0263] Activation of growth factor receptors: As used herein, unless indicated otherwise or contradictory in context, the term “activating” or “activation of”, when used in relation to a growth factor receptor, refers to the phosphorylation of the tyrosine kinase domain of such a growth factor receptor.

[0264] In one aspect, the present disclosure provides a GFR-binding compound, as part of a pharmaceutical association, combination or composition as defined herein, as an active principle for use in methods and uses described herein.

[0265] In one particular example, the growth factor receptor involved in the interaction with said GFR-binding compound is an epidermal growth factor receptor. In one particular example, the growth factor receptor involved in the interaction with said GFR-binding compound is a fibroblast growth factor receptor. In one particular example, the growth factor receptor involved in the interaction with said GFR-binding compound is a vascular endothelial growth factor receptor. In one particular example, the growth factor receptor involved in the interaction with said GFR-binding compound is a nerve growth factor receptor. In one particular example, the growth factor receptor involved in the interaction with said GFR-binding compound is a hepatocyte growth factor receptor. In one particular example, the growth factor receptor involved in the interaction with said GFR-binding compound is a somatomedin or insulin-like growth factor receptor. In one particular example, the growth factor receptor involved in the interaction with said GFR-binding compound is a platelet-derived growth factor receptor. In one particular example, the growth factor receptor involved in the interaction with said GFR-binding compound is a protein from the transforming growth factor beta (TGF-β) superfamily.

[0266] In one particular example, the growth factor receptor(s) involved in the interaction with said GFR-binding compound is (are) preferably selected from epidermal growth factor receptors, fibroblast growth factor receptors, vascular endothelial growth factor receptors, nerve growth factor receptors, hepatocyte growth factor receptors, somatomedin or insulin-like growth factor receptors, platelet-derived growth factor receptors, and transforming growth factor beta (TGF-β) superfamily proteins.

[0267] In one particular example, the gene expression of cyclin-D, in a neoplastic cell, is reduced, down-regulated, inhibited or suppressed during phase G1 of the cell cycle. In one particular example, the gene expression of cyclin-D is reduced or suppressed for substantially at least the entire duration of phase G1 of a cell cycle. In one particular example, the gene expression of cyclin-D is reduced by at least 20%. In one particular example, the gene expression of cyclin-D is reduced by at least 30%. In one particular example, the gene expression of cyclin-D is reduced by at least 40%. In one particular example, the gene expression of cyclin-D is reduced by at least 50%. In one particular example, the gene expression of cyclin-D is reduced by at least 60%. In one particular example, the gene expression of cyclin-D is reduced by at least 70%. In one particular example, the gene expression of cyclin-D is reduced by at least 80%. At least 40% is particularly preferred. Reduction of cyclin D gene expression is assessed with respect to the wild-type gene expression of cyclin-D and is measured by Quantitative Real Time Polymerase Chain Reaction (Q-PCR or RT-PCR) by (i) extracting RNA from the treated cells, (ii) converting the extracted RNA into the corresponding cDNA, (iii) subjecting the obtained cDNA to a real-time PCR amplification, (iv) analysing the data obtained from the real-time PCR amplification and comparing them with the data obtained by the ΔΔCt method, and (v) comparing the obtained values to the wild-type value.

[0268] In more details, Quantitative Real Time Polymerase Chain Reaction is carried out by (i) extracting RNA from the treated cells using the RNeasy total RNA kit from Qiagen®, (ii) converting the extracted RNA into the corresponding cDNA using a reverse transcription reaction (Gibco Brl®) and random primers from Invitrogen®, (iii) subjecting the obtained cDNA to a real-time PCR amplification in the presence of SYBR green reagents from Bio-Rad® in a thermocycler (iCycler, Biorad®), (iv) analysing the data obtained from the real-time PCR amplification with the iCycler IQ™ software following the iCycler iQ™ Real-Time PCR Detection System's instruction manual (Catalog Number 170-8740) and using weighted mean as a digital filter, PCR Baseline Subtracted Curve Fit as the analysis mode, FAM/490 as a fluorophore, the automatic calculation of the baseline cycles and the threshold, and the default settings for all other parameters, and comparing them with the data obtained by the ΔΔCt method as reported and described in Livak, K. J. and T. D. Schmittgen. “Analysis of relative gene expression data using real-time quantitative PCR and the 2(-Delta Delta C(T)) Method”, Methods (2001) 25(4): 402-408, hereby incorporated by reference in its entirety, and (v) comparing the obtained values to the wild-type value.

[0269] In one particular example, the gene expression of cyclin-D is maintained at such a reduced level (at least 20%, at least 30%, at least 40%, at least 50%, at least 60%, at least 70%, or at least 80%) during phase G1 of a cell cycle of the treated neoplastic cell. In one example, the gene expression of cyclin-D is maintained at such a reduced level during substantially the entire duration of the G1 phase. In one example, the gene expression of cyclin-D is maintained at such a reduced level during substantially the entire duration of the G1 and S phases. In one example, the gene expression of cyclin-D is maintained at such a reduced level during substantially the entire duration of the G1, S and G2 phases. In one example, the gene expression of cyclin-D is maintained at such a reduced level during substantially the entire duration of the G1, S, G2 and M phases i.e. during substantially the entire duration of a cell cycle of a treated neoplastic cell. Reduction of the gene expression level of cyclin D during substantially the entire duration of G1 is preferred.

[0270] As used herein, unless indicated otherwise or contradictory in context, the term “wild-type expression” of a protein or a gene, refers to the expression of a protein or a gene observed in normal, standard biological conditions i.e., in the present disclosure, without the presence of, or prior to the provision or administration to a neoplastic cell of a pharmaceutical association, combination or composition as defined herein. In-vitro, ex-vivo or in-vivo natural expression level of a protein or a gene in a neoplastic cell may thus be used as a comparative data (or control) to assess and quantify the effect of the presence or administration of a pharmaceutical association, combination or composition as defined herein on the expression level of such a protein or gene in that cell.

[0271] Suitable GFR-binding compounds for implementing certain embodiments of the invention include, without being limited to, linear (i.e. non-cyclic) GFR-binding compounds such as peptides, or variants or analogs thereof, or peptidomimetics, and cyclic GFR-binding compounds such as cyclic peptides, or variants or analogs thereof, or cyclic peptidomimetics.

### Non-Cyclic GFR-Binding Compounds

[0272] In one example, said non-cyclic GFR-binding compound has a molecular weight of less than 4,000 Daltons. In one particular example, said non-cyclic GFR-binding compound has a molecular weight of less than 3,000 Daltons. In one particular example, said non-cyclic GFR-binding compound has a molecular weight comprised between 600 and 4,000 Daltons. In one particular example, said non-cyclic GFR-binding compound has a molecular weight comprised between 800 and 4,000 Daltons. In one particular example, said non-cyclic GFR-binding compound has a molecular weight comprised between 600 and 3,000 Daltons. In one particular example, said non-cyclic GFR-binding compound has a molecular weight comprised between 800 and 3,000 Daltons. Between 800 and 3,000 Daltons is particularly preferred.

[0273] In one particular example, said GFR-binding compound is a (non-cyclic) peptide, or a variant or analog thereof, with (exclusively consisting of, or constituted of) between 8-30 amino acids, in particular between 8-25 amino acids or between 8-22 amino acids, more particularly between 18-22 amino acids, even more particularly between 19-21 or 20 amino acids, having growth factor receptor-binding capability or capabilities.

[0274] In one particular example, said GFR-binding compound is a (non-cyclic) peptidomimetic as defined herein, comprising (consecutively or non-consecutively) between 8-30 amino acids, in particular between 8-25 amino acids or between 8-22 amino acids, more particularly between 18-22 amino acids, even more particularly between 19-21 or 20; wherein said GFR-binding compound has a molecular weight comprised between 600 and 4,000 Daltons (in particular, between 800-4,000 Da, 600-3,000 Da, more particularly between 800-3,000 Da);

[0275] In one particular example, said GFR-binding compound is a peptide, a variant or analog thereof, or a peptidomimetic as defined herein, having growth factor receptor-binding capability or capabilities, having a molecular weight of between 600-4,000 Da, 600-3,000 Da, or 800-4,000 Da, in particular between 800 and 3,000 Da.

[0276] In one particular example, said GFR-binding compound is a peptide, a variant or analog thereof, or a peptidomimetic as defined herein, having growth factor receptor-binding capability or capabilities, with (comprising, or exclusively consisting of, or constituted of) between 8 and 30 (in particular between 8-25 or between 8-22, more particularly between 18-22, even more particularly between 19-21 or 20) amino acids, comprising a peptide with four amino acids (PEP1).

[0277] In one particular example, said GFR-binding compound is a peptide, a variant or analog thereof, or a peptidomimetic as defined herein, with (comprising, or exclusively consisting of, or constituted of) between 8 and 30 (in particular between 8-25 or between 8-22, more particularly between 18-22, even more particularly between 19-21 or 20) amino acids, comprising a peptide with eight amino acids (PEP12).

[0278] In one particular example, said GFR-binding compound is a peptide, a variant or analog thereof, or a peptidomimetic as defined herein, with (comprising, or exclusively consisting of, or constituted of) between 8 and 30 (in particular between 8-25 or between 8-22, more particularly between 18-22, even more particularly between 19-21 or 20) amino acids, comprising a peptide with four amino acids (PEP1); wherein said GFR-binding compound further comprises a peptide with three amino acids (PEP3).

[0279] In one particular example, said GFR-binding compound is a peptide, a variant or analog thereof, or a peptidomimetic as defined herein, with (comprising, or exclusively consisting of, or constituted of) between 8 and 30 (in particular between 8-25 or between 8-22, more particularly between 18-22, even more particularly between 19-21 or 20) amino acids, comprising a peptide with eight amino acids (PEP12); wherein said GFR-binding compound further comprises a peptide with three amino acids (PEP3).

[0280] In one particular example, said GFR-binding compound is a peptide, a variant or analog thereof, or a peptidomimetic as defined herein, with (comprising, or exclusively consisting of, or constituted of) between 8 and 30 (in particular between 8-25 or between 8-22, more particularly between 18-22, even more particularly between 19-21 or 20) amino acids, comprising a peptide with four amino acids (PEP1); wherein said GFR-binding compound further comprises a peptide with five amino acids (PEP5).

[0281] In one particular example, said GFR-binding compound is a peptide, a variant or analog thereof, or a peptidomimetic as defined herein, with (comprising, or exclusively consisting of, or constituted of) between 8 and 30 (in particular between 8-25 or between 8-22, more particularly between 18-22, even more particularly between 19-21 or 20) amino acids, comprising a peptide with eight amino acids (PEP12); wherein said GFR-binding compound further comprises a peptide with five amino acids (PEP5).

[0282] In one particular example, said GFR-binding compound is a peptide, a variant or analog thereof, or a peptidomimetic as defined herein, with (comprising, or exclusively consisting of, or constituted of) between 8 and 30 (in particular between 8-25 or between 8-22, more particularly between 18-22, even more particularly between 19-21 or 20) amino acids, comprising a peptide with four amino acids (PEP1); wherein said GFR-binding compound further comprises a peptide with between six and twelve amino acids (PEP9).

[0283] In one particular example, said GFR-binding compound is a peptide, a variant or analog thereof, or a peptidomimetic as defined herein, with (comprising, or exclusively consisting of, or constituted of) between 8 and 30 (in particular between 8-25 or between 8-22, more particularly between 18-22, even more particularly between 19-21 or 20) amino acids, comprising a peptide with eight amino acids (PEP12); wherein said GFR-binding compound further comprises a peptide with between six and twelve amino acids (PEP9).

[0284] In one particular example, said GFR-binding compound is a peptide, a variant or analog thereof, or a peptidomimetic as defined herein, with (comprising, or exclusively consisting of, or constituted of) between 8 and 30 (in particular between 8-25 or between 8-22, more particularly between 18-22, even more particularly between 19-21 or 20) amino acids, comprising a peptide with four amino acids (PEP1); wherein said GFR-binding compound further comprises a peptide with three amino acids (PEP3), an amino acid or a peptide with between two and seven amino acids (PEP7).

[0285] In one particular example, said GFR-binding compound is a peptide, a variant or analog thereof, or a peptidomimetic as defined herein, with (comprising, or exclusively consisting of, or constituted of) between 8 and 30 (in particular between 8-25 or between 8-22, more particularly between 18-22, even more particularly between 19-21 or 20) amino acids, comprising a peptide with four amino acids (PEP12); wherein said GFR-binding compound further comprises a peptide with three amino acids (PEP3), an amino acid or a peptide with between two and seven amino acids (PEP7).

[0286] In one particular example, said GFR-binding compound is a peptide, a variant or analog thereof, or a peptidomimetic as defined herein, with (comprising, or exclusively consisting of, or constituted of) between 8 and 30 (in particular between 8-25 or between 8-22, more particularly between 18-22, even more particularly between 19-21 or 20) amino acids, comprising a peptide with four amino acids (PEP1); wherein said GFR-binding compound further comprises a peptide with five amino acids (PEP5), an amino acid or a peptide with between two and seven amino acids (PEP7).

[0287] In one particular example, said GFR-binding compound is a peptide, a variant or analog thereof, or a peptidomimetic as defined herein, with (comprising, or exclusively consisting of, or constituted of) between 8 and 30 (in particular between 8-25 or between 8-22, more particularly between 18-22, even more particularly between 19-21 or 20) amino acids, comprising a peptide with four amino acids (PEP12); wherein said GFR-binding compound further comprises a peptide with five amino acids (PEP5), an amino acid or a peptide with between two and seven amino acids (PEP7).

[0288] In one particular example, said GFR-binding compound is a peptide, a variant or analog thereof, or a peptidomimetic as defined herein, with (comprising, or exclusively consisting of, or constituted of) between 8 and 30 (in particular between 8-25 or between 8-22, more particularly between 18-22, even more particularly between 19-21 or 20) amino acids, having the following general formula (I) (hereinafter may also be referred to as compound (I) or peptide (I)):

PEP(C)-PEP12 (I)

wherein PEP12 is a peptide with 8 amino acids of formula PEP1-AA¹⁷-PEP11 as defined herein; wherein one end of PEP(C) interacts covalently with PEP12 via one end of PEP1; wherein PEP(C) is a peptide with at least 5 amino acids, in particular a peptide with between 5 and 12 amino acids.

[0289] In one aspect, the present disclosure provides a GFR-binding compound of general formula (I), wherein PEP(C) comprises PEP3.

[0290] In one aspect, the present disclosure provides a GFR-binding compound of general formula (I), wherein PEP(C) comprises PEP5. In one particular example, PEP(C) is PEP5.

[0291] In one aspect, the present disclosure provides a GFR-binding compound of general formula (I), wherein PEP(C) comprises PEP9. In one particular example, PEP(C) is PEP9.

[0292] In one aspect, the present disclosure provides a GFR-binding compound of general formula (I), wherein PEP(C) comprises PEP3 and PEP7.

[0293] In one aspect, the present disclosure provides a GFR-binding compound of general formula (I), wherein PEP(C) comprises PEP5 and PEP7.

[0294] In one particular example, said GFR-binding compound is a peptide, a variant or analog thereof, or a peptidomimetic as defined herein, with (comprising, or exclusively consisting of, or constituted of) between 8 and 30 (in particular between 8-25 or between 8-22, more particularly between 18-22, even more particularly between 19-21 or 20) amino acids, having the following general formula (II) (hereinafter may also be referred to as compound (II) or peptide (II)):

PEP7-PEP5-PEP12 (II)

wherein PEP12 is a peptide with 8 amino acids of formula PEP1-AA¹⁷-PEP11 as defined herein; wherein PEP5 is a peptide with five amino acids as defined herein; wherein PEP7 is an amino acid or a peptide with between two and seven amino acids as defined herein; wherein one end of PEP5 interacts covalently with one end of PEP12 via one end of PEP1; wherein another end of PEP5 interacts covalently with one end of PEP7 via AA⁷.

[0295] In certain embodiments, PEP1 is selected from the group consisting of SAIS (SEQ ID NO: 13570), SSLS (SEQ ID NO: 13575), NAIS (SEQ ID NO: 13567), SATS (SEQ ID NO: 13571), SPIS (SEQ ID NO: 13574), EPIS (SEQ ID NO: 13563), SPIN (SEQ ID NO: 13573), KPLS (SEQ ID NO: 13566), EPLP (SEQ ID NO: 13564), EPLT (SEQ ID NO: 13565), SNIT (SEQ ID NO: 13572), RSVK (SEQ ID NO: 13569) and RPVQ (SEQ ID NO: 13568).

[0296] In certain embodiments, PEP3 is selected from the group consisting of VPT, VPE, APT, TPT, VPA, APV, VPQ, VSQ, SRV and TQV.

[0297] In certain embodiments, PEP5 is a peptide of general formula PEP3-AA¹¹-AA¹²; wherein PEP3 is selected from the group consisting of VPT, VPE, APT, TPT, VPA, APV, VPQ, VSQ, SRV and TQV; wherein AA¹¹ is selected from the group consisting of E, K, Q, R, A, D, G and H; and wherein AA¹² is selected from the group consisting of L, M, T, E, Q and H. In one particular example, PEP5 is selected from the group consisting of VPTEL (SEQ ID NO: 13631), VPEKM (SEQ ID NO: 13616), APTKL (SEQ ID NO: 13579), APTQL (SEQ ID NO: 13582), VPTKL (SEQ ID NO: 13633), TPTKM (SEQ ID NO: 13598), VPARL (SEQ ID NO: 13611), VPTRL (SEQ ID NO: 13637), APVKT (SEQ ID NO: 13589), VPQAL (SEQ ID NO: 13620), VSQDL (SEQ ID NO: 13639), VPQDL (SEQ ID NO: 13621), VPTEE (SEQ ID NO: 13630), VPTGQ (SEQ ID NO: 13632), SRVHH (SEQ ID NO: 13592) and TQVQL (SEQ ID NO: 13603).

[0298] In certain embodiments, PEP7 is an amino acid or a peptide with between two and seven amino acids of general formula AA¹-AA²-AA³-AA⁴-AA⁵-AA⁶-AA⁷ (SEQ ID NO: 13816); wherein AA¹, AA², AA³, AA⁴, and AA⁵ are independently absent or AA^{I} as defined herein; wherein AA⁶ is absent or selected from the group consisting of S, T, C, E, Q, P and R; wherein AA⁷ is absent or is selected from the group consisting of S, T, C, E, Q, P and R, and wherein at least one of AA¹, AA², AA³, AA⁴, AA⁵, AA⁶ or AA⁷ is not absent. In one particular example, PEP7 is selected from the group consisting of KIPKAXX (SEQ ID NO: 13655), GIPEPXX (SEQ ID NO: 13650), SIPKAXX (SEQ ID NO: 13660), HVTKPTX (SEQ ID NO: 13653), YVPKPXX (SEQ ID NO: 13664), TVPKPXX (SEQ ID NO: 13663), AVPKAXX (SEQ ID NO: 13649), KVGKAXX (SEQ ID NO: 13656), KASKAXX (SEQ ID NO: 13654), GSAGPXX (SEQ ID NO: 13651), AAPASXX (SEQ ID NO: 13646), STPPTXX (SEQ ID NO: 13662), HVPKPXX (SEQ ID NO: 13652), RVPSTXX (SEQ ID NO: 13659), ASAAPXX (SEQ ID NO: 13647), ASASPXX (SEQ ID NO: 13648), NDEGLEX (SEQ ID NO: 13657), SSVKXQP (SEQ ID NO: 13661) and RNVQXRP (SEQ ID NO: 13658), wherein X is C or S throughout the present description.

[0299] In certain embodiments, PEP9 is a peptide of general formula PEP7-PEP5; wherein PEP5 is a peptide of formula PEP3-AA¹¹-AA¹²; wherein PEP3 is selected from the group consisting of VPT, VPE, APT, TPT, VPA, APV, VPQ, VSQ, SRV and TQV; wherein AA¹¹ is selected from the group consisting of E, K, Q, R, A, D, G and H; and wherein AA¹² is selected from the group consisting of L, M, T, E, Q and H; wherein PEP7 is an amino acid or a peptide with between two and seven amino acids of general formula AA¹-AA²-AA³-AA⁴-AA⁵-AA⁶-AA⁷ (SEQ ID NO: 13816); wherein AA¹, AA², AA³, AA⁴, and AA⁵ are independently absent or AA^{I} as defined herein; wherein AA⁶ is absent or selected from the group consisting of S, T, C, E, Q, P and R; wherein AA⁷ is absent or is selected from the group consisting of S, T, C, E, Q, P and R. In one particular example, PEP9 is selected from the group consisting of KIPKAXXVPTEL (SEQ ID NO: 13745), GIPEPXXVPEKM (SEQ ID NO: 13701), SIPKAXXVPTEL (SEQ ID NO: 13773), HVTKPTXAPTKL (SEQ ID NO: 13721), YVPKPXXAPTKL (SEQ ID NO: 13793), TVPKPXXAPTQL (SEQ ID NO: 13785), AVPKAXXAPTKL (SEQ ID NO: 13689), KVGKAXXVPTKL (SEQ ID NO: 13753), KASKAXXVPTKL (SEQ ID NO: 13737), GSAGPXXTPTKM (SEQ ID NO: 13707), AAPASXXVPARL (SEQ ID NO: 13668), STPPTXXVPTRL (SEQ ID NO: 13783), HVPKPXXAPTKL (SEQ ID NO: 13713), RVPSTXXAPVKT (SEQ ID NO: 13760), ASAAPXXVPQAL (SEQ ID NO: 13678), ASASPXXVSQDL (SEQ ID NO: 13688), ASASPXXVPQDL (SEQ ID NO: 13686), NDEGLEXVPTEE (SEQ ID NO: 13755), NDEGLEXVPTGQ (SEQ ID NO: 13756), SSVKXQPSRVHH (SEQ ID NO: 13775) and RNVQXRPTQVQL (SEQ ID NO: 13758), wherein X is C or S throughout the present description.

[0300] In certain embodiments, PEP12 is a peptide of general formula PEP1-AA¹⁷-PEP11; wherein AA¹⁷ is selected from the group consisting of G, A, V, L, I, P, F, M, W, T and S (in particular is selected from the group consisting of M, I, L, V and T); wherein PEP1 is selected from the group consisting of SAIS (SEQ ID NO: 13570), SSLS (SEQ ID NO: 13575), NAIS (SEQ ID NO: 13567), SATS (SEQ ID NO: 13571), SPIS (SEQ ID NO: 13574), EPIS (SEQ ID NO: 13563), SPIN (SEQ ID NO: 13573), KPLS (SEQ ID NO: 13566), EPLP (SEQ ID NO: 13564), EPLT (SEQ ID NO: 13565), SNIT (SEQ ID NO: 13572), RSVK (SEQ ID NO: 13569) and RPVQ (SEQ ID NO: 13568).

[0301] In particular, in certain embodiments, the pair PEP3:PEP1 is selected from the group consisting of VPT:SAIS (SEQ ID NO: 13570), VPE:SAIS (SEQ ID NO: 13570), APT:SAIS (SEQ ID NO: 13570), TPT:SAIS (SEQ ID NO: 13570), VPA:SAIS (SEQ ID NO: 13570), APV:SAIS (SEQ ID NO: 13570), VPQ:SAIS (SEQ ID NO: 13570), VSQ:SAIS (SEQ ID NO: 13570), SRV:SAIS (SEQ ID NO: 13570), TQV:SAIS (SEQ ID NO: 13570), VPE:SSLS (SEQ ID NO: 13575), VPT:SSLS (SEQ ID NO: 13575), APT:SSLS (SEQ ID NO: 13575), TPT:SSLS (SEQ ID NO: 13575), VPA:SSLS (SEQ ID NO: 13575), APV:SSLS (SEQ ID NO: 13575), VPQ:SSLS (SEQ ID NO: 13575), VSQ:SSLS (SEQ ID NO: 13575), SRV:SSLS (SEQ ID NO: 13575), TQV:SSLS (SEQ ID NO: 13575), APT:NAIS (SEQ ID NO: 13567), VPT:NAIS (SEQ ID NO: 13567), VPE:NAIS (SEQ ID NO: 13567), TPT:NAIS (SEQ ID NO: 13567), VPA:NAIS (SEQ ID NO: 13567), APV:NAIS (SEQ ID NO: 13567), VPQ:NAIS (SEQ ID NO: 13567), VSQ:NAIS (SEQ ID NO: 13567), SRV:NAIS (SEQ ID NO: 13567), TQV:NAIS (SEQ ID NO: 13567), APT:SATS (SEQ ID NO: 13571), VPT:SATS (SEQ ID NO: 13571), VPE:SATS (SEQ ID NO: 13571), TPT:SATS (SEQ ID NO: 13571), VPA:SATS (SEQ ID NO: 13571), APV:SATS (SEQ ID NO: 13571), VPQ:SATS (SEQ ID NO: 13571), VSQ:SATS (SEQ ID NO: 13571), SRV:SATS (SEQ ID NO: 13571), TQV:SATS (SEQ ID NO: 13571), VPT:SPIS (SEQ ID NO: 13574), VPE:SPIS (SEQ ID NO: 13574), APT:SPIS (SEQ ID NO: 13574), TPT:SPIS (SEQ ID NO: 13574), VPA:SPIS (SEQ ID NO: 13574), APV:SPIS (SEQ ID NO: 13574), VPQ:SPIS (SEQ ID NO: 13574), VSQ:SPIS (SEQ ID NO: 13574), SRV:SPIS (SEQ ID NO: 13574), TQV:SPIS (SEQ ID NO: 13574), VPT:EPIS (SEQ ID NO: 13563), VPE:EPIS (SEQ ID NO: 13563), APT:EPIS (SEQ ID NO: 13563), TPT:EPIS (SEQ ID NO: 13563), VPA:EPIS (SEQ ID NO: 13563), APV:EPIS (SEQ ID NO: 13563), VPQ:EPIS (SEQ ID NO: 13563), VSQ:EPIS (SEQ ID NO: 13563), SRV:EPIS (SEQ ID NO: 13563), TQV:EPIS (SEQ ID NO: 13563), TPT:SPIN (SEQ ID NO: 13573), VPT:SPIN (SEQ ID NO: 13573), VPE:SPIN (SEQ ID NO: 13573), APT:SPIN (SEQ ID NO: 13573), VPA:SPIN (SEQ ID NO: 13573), APV:SPIN (SEQ ID NO: 13573), VPQ:SPIN (SEQ ID NO: 13573), VSQ:SPIN (SEQ ID NO: 13573), SRV:SPIN (SEQ ID NO: 13573), TQV:SPIN (SEQ ID NO: 13573), APV:KPLS (SEQ ID NO: 13566), VPT:KPLS (SEQ ID NO: 13566), VPE:KPLS (SEQ ID NO: 13566), APT:KPLS (SEQ ID NO: 13566), TPT:KPLS (SEQ ID NO: 13566), VPA:KPLS (SEQ ID NO: 13566), VPQ:KPLS (SEQ ID NO: 13566), VSQ:KPLS (SEQ ID NO: 13566), SRV:KPLS (SEQ ID NO: 13566), TQV:KPLS (SEQ ID NO: 13566), VPQ:EPLP (SEQ ID NO: 13564), VPT:EPLP (SEQ ID NO: 13564), VPE:EPLP (SEQ ID NO: 13564), APT:EPLP (SEQ ID NO: 13564), TPT:EPLP (SEQ ID NO: 13564), VPA:EPLP (SEQ ID NO: 13564), APV:EPLP (SEQ ID NO: 13564), VSQ:EPLP (SEQ ID NO: 13564), SRV:EPLP (SEQ ID NO: 13564), TQV:EPLP (SEQ ID NO: 13564), VSQ:EPLT (SEQ ID NO: 13565), VPT:EPLT (SEQ ID NO: 13565), VPE:EPLT (SEQ ID NO: 13565), APT:EPLT (SEQ ID NO: 13565), TPT:EPLT (SEQ ID NO: 13565), VPA:EPLT (SEQ ID NO: 13565), APV:EPLT (SEQ ID NO: 13565), VPQ:EPLT (SEQ ID NO: 13565), SRV:EPLT (SEQ ID NO: 13565), TQV:EPLT (SEQ ID NO: 13565), VPT:SNIT (SEQ ID NO: 13572), VPE:SNIT (SEQ ID NO: 13572), APT:SNIT (SEQ ID NO: 13572), TPT:SNIT (SEQ ID NO: 13572), VPA:SNIT (SEQ ID NO: 13572), APV:SNIT (SEQ ID NO: 13572), VPQ:SNIT (SEQ ID NO: 13572), VSQ:SNIT (SEQ ID NO: 13572), SRV:SNIT (SEQ ID NO: 13572), TQV:SNIT (SEQ ID NO: 13572), SRV:RSVK (SEQ ID NO: 13569), VPT:RSVK (SEQ ID NO: 13569), VPE:RSVK (SEQ ID NO: 13569), APT:RSVK (SEQ ID NO: 13569), TPT:RSVK (SEQ ID NO: 13569), VPA:RSVK (SEQ ID NO: 13569), APV:RSVK (SEQ ID NO: 13569), VPQ:RSVK (SEQ ID NO: 13569), VSQ:RSVK (SEQ ID NO: 13569), TQV:RSVK (SEQ ID NO: 13569), TQV:RPVQ (SEQ ID NO: 13568), VPT:RPVQ (SEQ ID NO: 13568), VPE:RPVQ (SEQ ID NO: 13568), APT:RPVQ (SEQ ID NO: 13568), TPT:RPVQ (SEQ ID NO: 13568), VPA:RPVQ (SEQ ID NO: 13568), APV:RPVQ (SEQ ID NO: 13568), VPQ:RPVQ (SEQ ID NO: 13568), VSQ:RPVQ (SEQ ID NO: 13568) and SRV:RPVQ (SEQ ID NO: 13568).

[0302] In particular, in certain embodiments, the pair PEP5:PEP1 is selected from the group consisting of VPTKM (SEQ ID NO: 13634):SAIS (SEQ ID NO: 13570), VPTKL (SEQ ID NO: 13633):SAIS (SEQ ID NO: 13570), VPTQL (SEQ ID NO: 13636):SAIS (SEQ ID NO: 13570), VPTRL (SEQ ID NO: 13637):SAIS (SEQ ID NO: 13570), VPTKT (SEQ ID NO: 13635):SAIS (SEQ ID NO: 13570), VPTAL (SEQ ID NO: 13628):SAIS (SEQ ID NO: 13570), VPTDL (SEQ ID NO: 13629):SAIS (SEQ ID NO: 13570), VPEKM (SEQ ID NO: 13616):SAIS (SEQ ID NO: 13570), APTKL (SEQ ID NO: 13579):SAIS (SEQ ID NO: 13570), APTQL (SEQ ID NO: 13582):SAIS (SEQ ID NO: 13570), TPTKM (SEQ ID NO: 13598):SAIS (SEQ ID NO: 13570), VPARL (SEQ ID NO: 13611):SAIS (SEQ ID NO: 13570), APVKT (SEQ ID NO: 13589):SAIS (SEQ ID NO: 13570), VPQAL (SEQ ID NO: 13620):SAIS (SEQ ID NO: 13570), VSQDL (SEQ ID NO: 13639):SAIS (SEQ ID NO: 13570), VPQDL (SEQ ID NO: 13621):SAIS (SEQ ID NO: 13570), SRVHH (SEQ ID NO: 13592):SAIS (SEQ ID NO: 13570), TQVQL (SEQ ID NO: 13603):SAIS (SEQ ID NO: 13570), VPEEL (SEQ ID NO: 13614):SSLS (SEQ ID NO: 13575), VPEKL (SEQ ID NO: 13615):SSLS (SEQ ID NO: 13575), VPEQL (SEQ ID NO: 13618):SSLS (SEQ ID NO: 13575), VPEKM (SEQ ID NO: 13616):SSLS (SEQ ID NO: 13575), VPERL (SEQ ID NO: 13619):SSLS (SEQ ID NO: 13575), VPEKT (SEQ ID NO: 13617):SSLS (SEQ ID NO: 13575), VPEAL (SEQ ID NO: 13612):SSLS (SEQ ID NO: 13575), VPEDL (SEQ ID NO: 13613):SSLS (SEQ ID NO: 13575), VPTEL (SEQ ID NO: 13631):SSLS (SEQ ID NO: 13575), APTKL (SEQ ID NO: 13579):SSLS (SEQ ID NO: 13575), APTQL (SEQ ID NO: 13582):SSLS (SEQ ID NO: 13575), VPTKL (SEQ ID NO: 13633):SSLS (SEQ ID NO: 13575), TPTKM (SEQ ID NO: 13598):SSLS (SEQ ID NO: 13575), VPARL (SEQ ID NO: 13611):SSLS (SEQ ID NO: 13575), VPTRLSSLS, APVKT (SEQ ID NO: 13589):SSLS (SEQ ID NO: 13575), VPQAL (SEQ ID NO: 13620):SSLS (SEQ ID NO: 13575), VSQDL (SEQ ID NO: 13639):SSLS (SEQ ID NO: 13575), VPQDL (SEQ ID NO: 13621):SSLS (SEQ ID NO: 13575), VPTEE (SEQ ID NO: 13630):SSLS (SEQ ID NO: 13575), VPTGQSSLS, SRVHH (SEQ ID NO: 13592):SSLS (SEQ ID NO: 13575), TQVQL (SEQ ID NO: 13603):SSLS (SEQ ID NO: 13575), APTEL (SEQ ID NO: 13578):NAIS (SEQ ID NO: 13567), APTKM (SEQ ID NO: 13580):NAIS (SEQ ID NO: 13567), APTKL (SEQ ID NO: 13579):NAIS (SEQ ID NO: 13567), APTRL (SEQ ID NO: 13583):NAIS (SEQ ID NO: 13567), APTKT (SEQ ID NO: 13581):NAIS (SEQ ID NO: 13567), APTAL (SEQ ID NO: 13576):NAIS (SEQ ID NO: 13567), APTDL (SEQ ID NO: 13577):NAIS (SEQ ID NO: 13567), VPTEL (SEQ ID NO: 13631):NAIS (SEQ ID NO: 13567), VPEKM (SEQ ID NO: 13616):NAIS (SEQ ID NO: 13567), VPTKL (SEQ ID NO: 13633):NAIS (SEQ ID NO: 13567), TPTKM (SEQ ID NO: 13598):NAIS (SEQ ID NO: 13567), VPARL (SEQ ID NO: 13611):NAIS (SEQ ID NO: 13567), VPTRL (SEQ ID NO: 13637):NAIS (SEQ ID NO: 13567), APVKT (SEQ ID NO: 13589):NAIS (SEQ ID NO: 13567), VPQAL (SEQ ID NO: 13620):NAIS (SEQ ID NO: 13567), VSQDL (SEQ ID NO: 13639):NAIS (SEQ ID NO: 13567), VPQDL (SEQ ID NO: 13621):NAIS (SEQ ID NO: 13567), VPTEE (SEQ ID NO: 13630):NAIS (SEQ ID NO: 13567), VPTGQ (SEQ ID NO: 13632):NAIS (SEQ ID NO: 13567), SRVHH (SEQ ID NO: 13592):NAIS (SEQ ID NO: 13567), TQVQL (SEQ ID NO: 13603):NAIS (SEQ ID NO: 13567), APTEL (SEQ ID NO: 13578):SATS (SEQ ID NO: 13571), APTKM (SEQ ID NO: 13580):SATS (SEQ ID NO: 13571), APTKL (SEQ ID NO: 13579):SATS (SEQ ID NO: 13571), APTQL (SEQ ID NO: 13582):SATS (SEQ ID NO: 13571), APTRL (SEQ ID NO: 13583):SATS (SEQ ID NO: 13571), APTKT (SEQ ID NO: 13581):SATS (SEQ ID NO: 13571), APTAL (SEQ ID NO: 13576):SATS (SEQ ID NO: 13571), APTDL (SEQ ID NO: 13577):SATS (SEQ ID NO: 13571), VPTEL (SEQ ID NO: 13631):SATS (SEQ ID NO: 13571), VPEKM (SEQ ID NO: 13616):SATS (SEQ ID NO: 13571), VPTKL (SEQ ID NO: 13633):SATS (SEQ ID NO: 13571), TPTKM (SEQ ID NO: 13598):SATS (SEQ ID NO: 13571), VPARL (SEQ ID NO: 13611):SATS (SEQ ID NO: 13571), VPTRL (SEQ ID NO: 13637):SATS (SEQ ID NO: 13571), APVKT (SEQ ID NO: 13589):SATS (SEQ ID NO: 13571), VPQAL (SEQ ID NO: 13620):SATS (SEQ ID NO: 13571), VSQDL (SEQ ID NO: 13639):SATS (SEQ ID NO: 13571), VPQDL (SEQ ID NO: 13621):SATS (SEQ ID NO: 13571), VPTEE (SEQ ID NO: 13630):SATS (SEQ ID NO: 13571), VPTGQ (SEQ ID NO: 13632):SATS (SEQ ID NO: 13571), SRVHH (SEQ ID NO: 13592):SATS (SEQ ID NO: 13571), TQVQL (SEQ ID NO: 13603):SATS (SEQ ID NO: 13571), VPTEL (SEQ ID NO: 13631):SPIS (SEQ ID NO: 13574), VPTKM (SEQ ID NO: 13634):SPIS (SEQ ID NO: 13574), VPTKL (SEQ ID NO: 13633):SPIS (SEQ ID NO: 13574), VPTQL (SEQ ID NO: 13636):SPIS (SEQ ID NO: 13574), VPTRL (SEQ ID NO: 13637):SPIS (SEQ ID NO: 13574), VPTKT (SEQ ID NO: 13635):SPIS (SEQ ID NO: 13574), VPTAL (SEQ ID NO: 13628):SPIS (SEQ ID NO: 13574), VPTDL (SEQ ID NO: 13629):SPIS (SEQ ID NO: 13574), VPEKM (SEQ ID NO: 13616):SPIS (SEQ ID NO: 13574), APTKL (SEQ ID NO: 13579):SPIS (SEQ ID NO: 13574), APTQL (SEQ ID NO: 13582):SPIS (SEQ ID NO: 13574), TPTKM (SEQ ID NO: 13598):SPIS (SEQ ID NO: 13574), VPARL (SEQ ID NO: 13611):SPIS (SEQ ID NO: 13574), APVKT (SEQ ID NO: 13589):SPIS (SEQ ID NO: 13574), VPQAL (SEQ ID NO: 13620):SPIS (SEQ ID NO: 13574), VSQDL (SEQ ID NO: 13639):SPIS (SEQ ID NO: 13574), VPQDL (SEQ ID NO: 13621):SPIS (SEQ ID NO: 13574), SRVHH (SEQ ID NO: 13592):SPIS (SEQ ID NO: 13574), TQVQL (SEQ ID NO: 13603):SPIS (SEQ ID NO: 13574), VPTEL (SEQ ID NO: 13631):EPIS (SEQ ID NO: 13563), VPTKM (SEQ ID NO: 13634):EPIS (SEQ ID NO: 13563), VPTKL (SEQ ID NO: 13633):EPIS (SEQ ID NO: 13563), VPTQL (SEQ ID NO: 13636):EPIS (SEQ ID NO: 13563), VPTRL (SEQ ID NO: 13637):EPIS (SEQ ID NO: 13563), VPTKT (SEQ ID NO: 13635):EPIS (SEQ ID NO: 13563), VPTAL (SEQ ID NO: 13628):EPIS (SEQ ID NO: 13563), VPTDL (SEQ ID NO: 13629):EPIS (SEQ ID NO: 13563), VPEKM (SEQ ID NO: 13616):EPIS (SEQ ID NO: 13563), APTKL (SEQ ID NO: 13579):EPIS (SEQ ID NO: 13563), APTQL (SEQ ID NO: 13582):EPIS (SEQ ID NO: 13563), TPTKM (SEQ ID NO: 13598):EPIS (SEQ ID NO: 13563), VPARL (SEQ ID NO: 13611):EPIS (SEQ ID NO: 13563), APVKT (SEQ ID NO: 13589):EPIS (SEQ ID NO: 13563), VPQAL (SEQ ID NO: 13620):EPIS (SEQ ID NO: 13563), VSQDL (SEQ ID NO: 13639):EPIS (SEQ ID NO: 13563), VPQDL (SEQ ID NO: 13621):EPIS (SEQ ID NO: 13563), SRVHH (SEQ ID NO: 13592):EPIS (SEQ ID NO: 13563), TQVQL (SEQ ID NO: 13603):EPIS (SEQ ID NO: 13563), TPTEL (SEQ ID NO: 13596):SPIN (SEQ ID NO: 13573), TPTKM (SEQ ID NO: 13598):SPIN (SEQ ID NO: 13573), TPTKL (SEQ ID NO: 13597):SPIN (SEQ ID NO: 13573), TPTQL (SEQ ID NO: 13600):SPIN (SEQ ID NO: 13573), TPTRL (SEQ ID NO: 13601):SPIN (SEQ ID NO: 13573), TPTKT (SEQ ID NO: 13599):SPIN (SEQ ID NO: 13573), TPTAL (SEQ ID NO: 13594):SPIN (SEQ ID NO: 13573), TPTDL (SEQ ID NO: 13595):SPIN (SEQ ID NO: 13573), VPTEL (SEQ ID NO: 13631):SPIN (SEQ ID NO: 13573), VPEKM (SEQ ID NO: 13616):SPIN (SEQ ID NO: 13573), APTKL (SEQ ID NO: 13579):SPIN (SEQ ID NO: 13573), APTQL (SEQ ID NO: 13582):SPIN (SEQ ID NO: 13573), VPTKL (SEQ ID NO: 13633):SPIN (SEQ ID NO: 13573), VPARL (SEQ ID NO: 13611):SPIN (SEQ ID NO: 13573), VPTRL (SEQ ID NO: 13637):SPIN (SEQ ID NO: 13573), APVKT (SEQ ID NO: 13589):SPIN (SEQ ID NO: 13573), VPQAL (SEQ ID NO: 13620):SPIN (SEQ ID NO: 13573), VSQDL (SEQ ID NO: 13639):SPIN (SEQ ID NO: 13573), VPQDL (SEQ ID NO: 13621):SPIN (SEQ ID NO: 13573), VPTEE (SEQ ID NO: 13630):SPIN (SEQ ID NO: 13573), VPTGQ (SEQ ID NO: 13632):SPIN (SEQ ID NO: 13573), SRVHH (SEQ ID NO: 13592):SPIN (SEQ ID NO: 13573), TQVQL (SEQ ID NO: 13603):SPIN (SEQ ID NO: 13573), VPAEL (SEQ ID NO: 13606):SPIS (SEQ ID NO: 13574), VPAKM (SEQ ID NO: 13608):SPIS (SEQ ID NO: 13574), VPAKL (SEQ ID NO: 13607):SPIS (SEQ ID NO: 13574), VPAQL (SEQ ID NO: 13610):SPIS (SEQ ID NO: 13574), VPAKT (SEQ ID NO: 13609):SPIS (SEQ ID NO: 13574), VPAAL (SEQ ID NO: 13604):SPIS (SEQ ID NO: 13574), VPADL (SEQ ID NO: 13605):SPIS (SEQ ID NO: 13574), VPTEE (SEQ ID NO: 13630):SPIS (SEQ ID NO: 13574), VPTGQ (SEQ ID NO: 13632):SPIS (SEQ ID NO: 13574), APVEL (SEQ ID NO: 13586):KPLS (SEQ ID NO: 13566), APVKM (SEQ ID NO: 13588):KPLS (SEQ ID NO: 13566), APVKL (SEQ ID NO: 13587):KPLS (SEQ ID NO: 13566), APVQL (SEQ ID NO: 13590):KPLS (SEQ ID NO: 13566), APVRL (SEQ ID NO: 13591):KPLS (SEQ ID NO: 13566), APVAL (SEQ ID NO: 13584):KPLS (SEQ ID NO: 13566), APVDL (SEQ ID NO: 13585):KPLS (SEQ ID NO: 13566), VPTEL (SEQ ID NO: 13631):KPLS (SEQ ID NO: 13566), VPEKM (SEQ ID NO: 13616):KPLS (SEQ ID NO: 13566), APTKL (SEQ ID NO: 13579):KPLS (SEQ ID NO: 13566), APTQL (SEQ ID NO: 13582):KPLS (SEQ ID NO: 13566), VPTKL (SEQ ID NO: 13633):KPLS (SEQ ID NO: 13566), TPTKM (SEQ ID NO: 13598):KPLS (SEQ ID NO: 13566), VPARL (SEQ ID NO: 13611):KPLS (SEQ ID NO: 13566), VPTRL (SEQ ID NO: 13637):KPLS (SEQ ID NO: 13566), VPQAL (SEQ ID NO: 13620):KPLS (SEQ ID NO: 13566), VSQDL (SEQ ID NO: 13639):KPLS (SEQ ID NO: 13566), VPQDL (SEQ ID NO: 13621):KPLS (SEQ ID NO: 13566), VPTEE (SEQ ID NO: 13630):KPLS (SEQ ID NO: 13566), VPTGQ (SEQ ID NO: 13632):KPLS (SEQ ID NO: 13566), SRVHH (SEQ ID NO: 13592):KPLS (SEQ ID NO: 13566), TQVQL (SEQ ID NO: 13603):KPLS (SEQ ID NO: 13566), VPQEL (SEQ ID NO: 13622):EPLP (SEQ ID NO: 13564), VPQKM (SEQ ID NO: 13624):EPLP (SEQ ID NO: 13564), VPQKL (SEQ ID NO: 13623):EPLP (SEQ ID NO: 13564), VPQQL (SEQ ID NO: 13626):EPLP (SEQ ID NO: 13564), VPQRL (SEQ ID NO: 13627):EPLP (SEQ ID NO: 13564), VPQKT (SEQ ID NO: 13625):EPLP (SEQ ID NO: 13564), VPQDL (SEQ ID NO: 13621):EPLP (SEQ ID NO: 13564), VPTEL (SEQ ID NO: 13631):EPLP (SEQ ID NO: 13564), VPEKM (SEQ ID NO: 13616):EPLP (SEQ ID NO: 13564), APTKL (SEQ ID NO: 13579):EPLP (SEQ ID NO: 13564), APTQL (SEQ ID NO: 13582):EPLP (SEQ ID NO: 13564), VPTKL (SEQ ID NO: 13633):EPLP (SEQ ID NO: 13564), TPTKM (SEQ ID NO: 13598):EPLP (SEQ ID NO: 13564), VPARL (SEQ ID NO: 13611):EPLP (SEQ ID NO: 13564), VPTRL (SEQ ID NO: 13637):EPLP (SEQ ID NO: 13564), APVKT (SEQ ID NO: 13589):EPLP (SEQ ID NO: 13564), VSQDL (SEQ ID NO: 13639):EPLP (SEQ ID NO: 13564), VPTEE (SEQ ID NO: 13630):EPLP (SEQ ID NO: 13564), VPTGQ (SEQ ID NO: 13632):EPLP (SEQ ID NO: 13564), SRVHH (SEQ ID NO: 13592):EPLP (SEQ ID NO: 13564), TQVQL (SEQ ID NO: 13603):EPLP (SEQ ID NO: 13564), VSQEL (SEQ ID NO: 13640):EPLT (SEQ ID NO: 13565), VSQKM (SEQ ID NO: 13642):EPLT (SEQ ID NO: 13565), VSQKL (SEQ ID NO: 13641):EPLT (SEQ ID NO: 13565), VSQQL (SEQ ID NO: 13644):EPLT (SEQ ID NO: 13565), VSQRL (SEQ ID NO: 13645):EPLT (SEQ ID NO: 13565), VSQKT (SEQ ID NO: 13643):EPLT (SEQ ID NO: 13565), VSQAL (SEQ ID NO: 13638):EPLT (SEQ ID NO: 13565), VSQDL (SEQ ID NO: 13639):EPLT (SEQ ID NO: 13565), VPTEL (SEQ ID NO: 13631):EPLT (SEQ ID NO: 13565), VPEKM (SEQ ID NO: 13616):EPLT (SEQ ID NO: 13565), APTKL (SEQ ID NO: 13579):EPLT (SEQ ID NO: 13565), APTQL (SEQ ID NO: 13582):EPLT (SEQ ID NO: 13565), VPTKL (SEQ ID NO: 13633):EPLT (SEQ ID NO: 13565), TPTKM (SEQ ID NO: 13598):EPLT (SEQ ID NO: 13565), VPARL (SEQ ID NO: 13611):EPLT (SEQ ID NO: 13565), VPTRL (SEQ ID NO: 13637):EPLT (SEQ ID NO: 13565), APVKT (SEQ ID NO: 13589):EPLT (SEQ ID NO: 13565), VPQAL (SEQ ID NO: 13620):EPLT (SEQ ID NO: 13565), VPTEE (SEQ ID NO: 13630):EPLT (SEQ ID NO: 13565), VPTGQ (SEQ ID NO: 13632):EPLT (SEQ ID NO: 13565), SRVHH (SEQ ID NO: 13592):EPLT (SEQ ID NO: 13565), TQVQL (SEQ ID NO: 13603):EPLT (SEQ ID NO: 13565), VPQEL (SEQ ID NO: 13622):EPLT (SEQ ID NO: 13565), VPQKM (SEQ ID NO: 13624):EPLT (SEQ ID NO: 13565), VPQKL (SEQ ID NO: 13623):EPLT (SEQ ID NO: 13565), VPQQL (SEQ ID NO: 13626):EPLT (SEQ ID NO: 13565), VPQRL (SEQ ID NO: 13627):EPLT (SEQ ID NO: 13565), VPQKT (SEQ ID NO: 13625):EPLT (SEQ ID NO: 13565), VPQDL (SEQ ID NO: 13621):EPLT (SEQ ID NO: 13565), VPTGQ (SEQ ID NO: 13632):SNIT (SEQ ID NO: 13572), VPEKM (SEQ ID NO: 13616):SNIT (SEQ ID NO: 13572), APTKL (SEQ ID NO: 13579):SNIT (SEQ ID NO: 13572), APTQL (SEQ ID NO: 13582):SNIT (SEQ ID NO: 13572), TPTKM (SEQ ID NO: 13598):SNIT (SEQ ID NO: 13572), VPARL (SEQ ID NO: 13611):SNIT (SEQ ID NO: 13572), APVKT (SEQ ID NO: 13589):SNIT (SEQ ID NO: 13572), VPQAL (SEQ ID NO: 13620):SNIT (SEQ ID NO: 13572), VSQDL (SEQ ID NO: 13639):SNIT (SEQ ID NO: 13572), VPQDL (SEQ ID NO: 13621):SNIT (SEQ ID NO: 13572), SRVHH (SEQ ID NO: 13592):SNIT (SEQ ID NO: 13572), TQVQL (SEQ ID NO: 13603):SNIT (SEQ ID NO: 13572), SRVQL (SEQ ID NO: 13593):RSVK (SEQ ID NO: 13569), VPTEL (SEQ ID NO: 13631):RSVK (SEQ ID NO: 13569), VPEKM (SEQ ID NO: 13616):RSVK (SEQ ID NO: 13569), APTKL (SEQ ID NO: 13579):RSVK (SEQ ID NO: 13569), APTQL (SEQ ID NO: 13582):RSVK (SEQ ID NO: 13569), VPTKL (SEQ ID NO: 13633):RSVK (SEQ ID NO: 13569), TPTKM (SEQ ID NO: 13598):RSVK (SEQ ID NO: 13569), VPARL (SEQ ID NO: 13611):RSVK (SEQ ID NO: 13569), VPTRL (SEQ ID NO: 13637):RSVK (SEQ ID NO: 13569), APVKT (SEQ ID NO: 13589):RSVK (SEQ ID NO: 13569), VPQAL (SEQ ID NO: 13620):RSVK (SEQ ID NO: 13569), VSQDL (SEQ ID NO: 13639):RSVK (SEQ ID NO: 13569), VPQDL (SEQ ID NO: 13621):RSVK (SEQ ID NO: 13569), VPTEE (SEQ ID NO: 13630):RSVK (SEQ ID NO: 13569), VPTGQ (SEQ ID NO: 13632):RSVK (SEQ ID NO: 13569), TQVQL (SEQ ID NO: 13603):RSVK (SEQ ID NO: 13569), TQVHH (SEQ ID NO: 13602):RPVQ (SEQ ID NO: 13568), VPTEL (SEQ ID NO: 13631):RPVQ (SEQ ID NO: 13568), VPEKM (SEQ ID NO: 13616):RPVQ (SEQ ID NO: 13568), APTKL (SEQ ID NO: 13579):RPVQ (SEQ ID NO: 13568), APTQL (SEQ ID NO: 13582):RPVQ (SEQ ID NO: 13568), VPTKL (SEQ ID NO: 13633):RPVQ (SEQ ID NO: 13568), TPTKM (SEQ ID NO: 13598):RPVQ (SEQ ID NO: 13568), VPARL (SEQ ID NO: 13611):RPVQ (SEQ ID NO: 13568), VPTRL (SEQ ID NO: 13637):RPVQ (SEQ ID NO: 13568), APVKT (SEQ ID NO: 13589):RPVQ (SEQ ID NO: 13568), VPQAL (SEQ ID NO: 13620):RPVQ (SEQ ID NO: 13568), VSQDL (SEQ ID NO: 13639):RPVQ (SEQ ID NO: 13568), VPQDL (SEQ ID NO: 13621):RPVQ (SEQ ID NO: 13568), VPTEE (SEQ ID NO: 13630):RPVQ (SEQ ID NO: 13568), VPTGQ (SEQ ID NO: 13632):RPVQ (SEQ ID NO: 13568) and SRVHH (SEQ ID NO: 13592):RPVQ (SEQ ID NO: 13568).

[0303] In particular, in certain embodiments, the pair PEP7:PEP1 is selected from the group consisting of GIPEPXX (SEQ ID NO: 13650):SAIS (SEQ ID NO: 13570), HVTKPTX (SEQ ID NO: 13653):SAIS (SEQ ID NO: 13570), YVPKPXX (SEQ ID NO: 13664):SAIS (SEQ ID NO: 13570), TVPKPXX (SEQ ID NO: 13663):SAIS (SEQ ID NO: 13570), AVPKAXX (SEQ ID NO: 13649):SAIS (SEQ ID NO: 13570), KVGKAXX (SEQ ID NO: 13656):SAIS (SEQ ID NO: 13570), KASKAXX (SEQ ID NO: 13654):SAIS (SEQ ID NO: 13570), GSAGPXX (SEQ ID NO: 13651):SAIS (SEQ ID NO: 13570), AAPASXX (SEQ ID NO: 13646):SAIS (SEQ ID NO: 13570), STPPTXX (SEQ ID NO: 13662):SAIS (SEQ ID NO: 13570), HVPKPXX (SEQ ID NO: 13652):SAIS (SEQ ID NO: 13570), RVPSTXX (SEQ ID NO: 13659):SAIS (SEQ ID NO: 13570), ASAAPXX (SEQ ID NO: 13647):SAIS (SEQ ID NO: 13570), ASASPXX (SEQ ID NO: 13648):SAIS (SEQ ID NO: 13570), SSVKXQP (SEQ ID NO: 13661):SAIS (SEQ ID NO: 13570), RNVQXRP (SEQ ID NO: 13658):SAIS (SEQ ID NO: 13570), KIPKAXX (SEQ ID NO: 13655):SSLS (SEQ ID NO: 13575), SIPKAXX (SEQ ID NO: 13660):SSLS (SEQ ID NO: 13575), HVTKPTX (SEQ ID NO: 13653):SSLS (SEQ ID NO: 13575), YVPKPXX (SEQ ID NO: 13664):SSLS (SEQ ID NO: 13575), TVPKPXX (SEQ ID NO: 13663):SSLS (SEQ ID NO: 13575), AVPKAXX (SEQ ID NO: 13649):SSLS (SEQ ID NO: 13575), KVGKAXX (SEQ ID NO: 13656):SSLS (SEQ ID NO: 13575), KASKAXX (SEQ ID NO: 13654):SSLS (SEQ ID NO: 13575), GSAGPXX (SEQ ID NO: 13651):SSLS (SEQ ID NO: 13575), AAPASXX (SEQ ID NO: 13646):SSLS (SEQ ID NO: 13575), STPPTXX (SEQ ID NO: 13662):SSLS (SEQ ID NO: 13575), HVPKPXX (SEQ ID NO: 13652):SSLS (SEQ ID NO: 13575), RVPSTXX (SEQ ID NO: 13659):SSLS (SEQ ID NO: 13575), ASAAPXX (SEQ ID NO: 13647):SSLS (SEQ ID NO: 13575), ASASPXX (SEQ ID NO: 13648):SSLS (SEQ ID NO: 13575), NDEGLEX (SEQ ID NO: 13657):SSLS (SEQ ID NO: 13575), SSVKXQP (SEQ ID NO: 13661):SSLS (SEQ ID NO: 13575), RNVQXRP (SEQ ID NO: 13658):SSLS (SEQ ID NO: 13575), KIPKAXX (SEQ ID NO: 13655):NAIS (SEQ ID NO: 13567), GIPEPXX (SEQ ID NO: 13650):NAIS (SEQ ID NO: 13567), SIPKAXX (SEQ ID NO: 13660):NAIS (SEQ ID NO: 13567), AVPKAXX (SEQ ID NO: 13649):NAIS (SEQ ID NO: 13567), KVGKAXX (SEQ ID NO: 13656):NAIS (SEQ ID NO: 13567), KASKAXX (SEQ ID NO: 13654):NAIS (SEQ ID NO: 13567), GSAGPXX (SEQ ID NO: 13651):NAIS (SEQ ID NO: 13567), AAPASXX (SEQ ID NO: 13646):NAIS (SEQ ID NO: 13567), STPPTXX (SEQ ID NO: 13662):NAIS (SEQ ID NO: 13567), RVPSTXX (SEQ ID NO: 13659):NAIS (SEQ ID NO: 13567), ASAAPXX (SEQ ID NO: 13647):NAIS (SEQ ID NO: 13567), ASASPXX (SEQ ID NO: 13648):NAIS (SEQ ID NO: 13567), NDEGLEX (SEQ ID NO: 13657):NAIS (SEQ ID NO: 13567), SSVKXQP (SEQ ID NO: 13661):NAIS (SEQ ID NO: 13567), RNVQXRP (SEQ ID NO: 13658):NAIS (SEQ ID NO: 13567), KIPKAXX (SEQ ID NO: 13655):SATS (SEQ ID NO: 13571), GIPEPXX (SEQ ID NO: 13650):SATS (SEQ ID NO: 13571), SIPKAXX (SEQ ID NO: 13660):SATS (SEQ ID NO: 13571), HVTKPTX (SEQ ID NO: 13653):SATS (SEQ ID NO: 13571), YVPKPXX (SEQ ID NO: 13664):SATS (SEQ ID NO: 13571), TVPKPXX (SEQ ID NO: 13663):SATS (SEQ ID NO: 13571), KVGKAXX (SEQ ID NO: 13656):SATS (SEQ ID NO: 13571), KASKAXX (SEQ ID NO: 13654):SATS (SEQ ID NO: 13571), GSAGPXX (SEQ ID NO: 13651):SATS (SEQ ID NO: 13571), AAPASXX (SEQ ID NO: 13646):SATS (SEQ ID NO: 13571), STPPTXX (SEQ ID NO: 13662):SATS (SEQ ID NO: 13571), HVPKPXX (SEQ ID NO: 13652):SATS (SEQ ID NO: 13571), RVPSTXX (SEQ ID NO: 13659):SATS (SEQ ID NO: 13571), ASAAPXX (SEQ ID NO: 13647):SATS (SEQ ID NO: 13571), ASASPXX (SEQ ID NO: 13648):SATS (SEQ ID NO: 13571), NDEGLEX (SEQ ID NO: 13657):SATS (SEQ ID NO: 13571), SSVKXQP (SEQ ID NO: 13661):SATS (SEQ ID NO: 13571), RNVQXRP (SEQ ID NO: 13658):SATS (SEQ ID NO: 13571), KIPKAXX (SEQ ID NO: 13655):SPIS (SEQ ID NO: 13574), GIPEPXX (SEQ ID NO: 13650):SPIS (SEQ ID NO: 13574), SIPKAXX (SEQ ID NO: 13660):SPIS (SEQ ID NO: 13574), HVTKPTX (SEQ ID NO: 13653):SPIS (SEQ ID NO: 13574), YVPKPXX (SEQ ID NO: 13664):SPIS (SEQ ID NO: 13574), TVPKPXX (SEQ ID NO: 13663):SPIS (SEQ ID NO: 13574), AVPKAXX (SEQ ID NO: 13649):SPIS (SEQ ID NO: 13574), KASKAXX (SEQ ID NO: 13654):SPIS (SEQ ID NO: 13574), GSAGPXX (SEQ ID NO: 13651):SPIS (SEQ ID NO: 13574), AAPASXX (SEQ ID NO: 13646):SPIS (SEQ ID NO: 13574), STPPTXX (SEQ ID NO: 13662):SPIS (SEQ ID NO: 13574), HVPKPXX (SEQ ID NO: 13652):SPIS (SEQ ID NO: 13574), RVPSTXX (SEQ ID NO: 13659):SPIS (SEQ ID NO: 13574), ASAAPXX (SEQ ID NO: 13647):SPIS (SEQ ID NO: 13574), ASASPXX (SEQ ID NO: 13648):SPIS (SEQ ID NO: 13574), SSVKXQP (SEQ ID NO: 13661):SPIS (SEQ ID NO: 13574), RNVQXRP (SEQ ID NO: 13658):SPIS (SEQ ID NO: 13574), KIPKAXX (SEQ ID NO: 13655):EPIS (SEQ ID NO: 13563), GIPEPXX (SEQ ID NO: 13650):EPIS (SEQ ID NO: 13563), SIPKAXX (SEQ ID NO: 13660):EPIS (SEQ ID NO: 13563), HVTKPTX (SEQ ID NO: 13653):EPIS (SEQ ID NO: 13563), YVPKPXX (SEQ ID NO: 13664):EPIS (SEQ ID NO: 13563), TVPKPXX (SEQ ID NO: 13663):EPIS (SEQ ID NO: 13563), AVPKAXX (SEQ ID NO: 13649):EPIS (SEQ ID NO: 13563), KVGKAXX (SEQ ID NO: 13656):EPIS (SEQ ID NO: 13563), GSAGPXX (SEQ ID NO: 13651):EPIS (SEQ ID NO: 13563), AAPASXX (SEQ ID NO: 13646):EPIS (SEQ ID NO: 13563), STPPTXX (SEQ ID NO: 13662):EPIS (SEQ ID NO: 13563), HVPKPXX (SEQ ID NO: 13652):EPIS (SEQ ID NO: 13563), RVPSTXX (SEQ ID NO: 13659):EPIS (SEQ ID NO: 13563), ASAAPXX (SEQ ID NO: 13647):EPIS (SEQ ID NO: 13563), ASASPXX (SEQ ID NO: 13648):EPIS (SEQ ID NO: 13563), SSVKXQP (SEQ ID NO: 13661):EPIS (SEQ ID NO: 13563), RNVQXRP (SEQ ID NO: 13658):EPIS (SEQ ID NO: 13563), KIPKAXX (SEQ ID NO: 13655):SPIN (SEQ ID NO: 13573), GIPEPXX (SEQ ID NO: 13650):SPIN (SEQ ID NO: 13573), SIPKAXX (SEQ ID NO: 13660):SPIN (SEQ ID NO: 13573), HVTKPTX (SEQ ID NO: 13653):SPIN (SEQ ID NO: 13573), YVPKPXX (SEQ ID NO: 13664):SPIN (SEQ ID NO: 13573), TVPKPXX (SEQ ID NO: 13663):SPIN (SEQ ID NO: 13573), AVPKAXX (SEQ ID NO: 13649):SPIN (SEQ ID NO: 13573), KVGKAXX (SEQ ID NO: 13656):SPIN (SEQ ID NO: 13573), KASKAXX (SEQ ID NO: 13654):SPIN (SEQ ID NO: 13573), AAPASXX (SEQ ID NO: 13646):SPIN (SEQ ID NO: 13573), STPPTXX (SEQ ID NO: 13662):SPIN (SEQ ID NO: 13573), HVPKPXX (SEQ ID NO: 13652):SPIN (SEQ ID NO: 13573), RVPSTXX (SEQ ID NO: 13659):SPIN (SEQ ID NO: 13573), ASAAPXX (SEQ ID NO: 13647):SPIN (SEQ ID NO: 13573), ASASPXX (SEQ ID NO: 13648):SPIN (SEQ ID NO: 13573), NDEGLEX (SEQ ID NO: 13657):SPIN (SEQ ID NO: 13573), SSVKXQP (SEQ ID NO: 13661):SPIN (SEQ ID NO: 13573), RNVQXRP (SEQ ID NO: 13658):SPIN (SEQ ID NO: 13573), KVGKAXX (SEQ ID NO: 13656):SPIS (SEQ ID NO: 13574), NDEGLEX (SEQ ID NO: 13657):SPIS (SEQ ID NO: 13574), KIPKAXX (SEQ ID NO: 13655):KPLS (SEQ ID NO: 13566), GIPEPXX (SEQ ID NO: 13650):KPLS (SEQ ID NO: 13566), SIPKAXX (SEQ ID NO: 13660):KPLS (SEQ ID NO: 13566), HVTKPTX (SEQ ID NO: 13653):KPLS (SEQ ID NO: 13566), YVPKPXX (SEQ ID NO: 13664):KPLS (SEQ ID NO: 13566), TVPKPXX (SEQ ID NO: 13663):KPLS (SEQ ID NO: 13566), AVPKAXX (SEQ ID NO: 13649):KPLS (SEQ ID NO: 13566), KVGKAXX (SEQ ID NO: 13656):KPLS (SEQ ID NO: 13566), KASKAXX (SEQ ID NO: 13654):KPLS (SEQ ID NO: 13566), GSAGPXX (SEQ ID NO: 13651):KPLS (SEQ ID NO: 13566), AAPASXX (SEQ ID NO: 13646):KPLS (SEQ ID NO: 13566), STPPTXX (SEQ ID NO: 13662):KPLS (SEQ ID NO: 13566), HVPKPXX (SEQ ID NO: 13652):KPLS (SEQ ID NO: 13566), ASAAPXX (SEQ ID NO: 13647):KPLS (SEQ ID NO: 13566), ASASPXX (SEQ ID NO: 13648):KPLS (SEQ ID NO: 13566), NDEGLEX (SEQ ID NO: 13657):KPLS (SEQ ID NO: 13566), SSVKXQP (SEQ ID NO: 13661):KPLS (SEQ ID NO: 13566), RNVQXRP (SEQ ID NO: 13658):KPLS (SEQ ID NO: 13566), KIPKAXX (SEQ ID NO: 13655):EPLP (SEQ ID NO: 13564), GIPEPXX (SEQ ID NO: 13650):EPLP (SEQ ID NO: 13564), SIPKAXX (SEQ ID NO: 13660):EPLP (SEQ ID NO: 13564), HVTKPTX (SEQ ID NO: 13653):EPLP (SEQ ID NO: 13564), YVPKPXX (SEQ ID NO: 13664):EPLP (SEQ ID NO: 13564), TVPKPXX (SEQ ID NO: 13663):EPLP (SEQ ID NO: 13564), AVPKAXX (SEQ ID NO: 13649):EPLP (SEQ ID NO: 13564), KVGKAXX (SEQ ID NO: 13656):EPLP (SEQ ID NO: 13564), KASKAXX (SEQ ID NO: 13654):EPLP (SEQ ID NO: 13564), GSAGPXX (SEQ ID NO: 13651):EPLP (SEQ ID NO: 13564), AAPASXX (SEQ ID NO: 13646):EPLP (SEQ ID NO: 13564), STPPTXX (SEQ ID NO: 13662):EPLP (SEQ ID NO: 13564), HVPKPXX (SEQ ID NO: 13652):EPLP (SEQ ID NO: 13564), RVPSTXX (SEQ ID NO: 13659):EPLP (SEQ ID NO: 13564), ASASPXX (SEQ ID NO: 13648):EPLP (SEQ ID NO: 13564), NDEGLEX (SEQ ID NO: 13657):EPLP (SEQ ID NO: 13564), SSVKXQP (SEQ ID NO: 13661):EPLP (SEQ ID NO: 13564), RNVQXRP (SEQ ID NO: 13658):EPLP (SEQ ID NO: 13564), KIPKAXX (SEQ ID NO: 13655):EPLT (SEQ ID NO: 13565), GIPEPXX (SEQ ID NO: 13650):EPLT (SEQ ID NO: 13565), SIPKAXX (SEQ ID NO: 13660):EPLT (SEQ ID NO: 13565), HVTKPTX (SEQ ID NO: 13653):EPLT (SEQ ID NO: 13565), YVPKPXX (SEQ ID NO: 13664):EPLT (SEQ ID NO: 13565), TVPKPXX (SEQ ID NO: 13663):EPLT (SEQ ID NO: 13565), AVPKAXX (SEQ ID NO: 13649):EPLT (SEQ ID NO: 13565), KVGKAXX (SEQ ID NO: 13656):EPLT (SEQ ID NO: 13565), KASKAXX (SEQ ID NO: 13654):EPLT (SEQ ID NO: 13565), GSAGPXX (SEQ ID NO: 13651):EPLT (SEQ ID NO: 13565), AAPASXX (SEQ ID NO: 13646):EPLT (SEQ ID NO: 13565), STPPTXX (SEQ ID NO: 13662):EPLT (SEQ ID NO: 13565), HVPKPXX (SEQ ID NO: 13652):EPLT (SEQ ID NO: 13565), RVPSTXX (SEQ ID NO: 13659):EPLT (SEQ ID NO: 13565), ASAAPXX (SEQ ID NO: 13647):EPLT (SEQ ID NO: 13565), ASASPXX (SEQ ID NO: 13648):EPLT (SEQ ID NO: 13565), NDEGLEX (SEQ ID NO: 13657):EPLT (SEQ ID NO: 13565), SSVKXQP (SEQ ID NO: 13661):EPLT (SEQ ID NO: 13565), RNVQXRP (SEQ ID NO: 13658):EPLT (SEQ ID NO: 13565), NDEGLEX (SEQ ID NO: 13657):SNIT (SEQ ID NO: 13572), GIPEPXX (SEQ ID NO: 13650):SNIT (SEQ ID NO: 13572), HVTKPTX (SEQ ID NO: 13653):SNIT (SEQ ID NO: 13572), YVPKPXX (SEQ ID NO: 13664):SNIT (SEQ ID NO: 13572), TVPKPXX (SEQ ID NO: 13663):SNIT (SEQ ID NO: 13572), AVPKAXX (SEQ ID NO: 13649):SNIT (SEQ ID NO: 13572), GSAGPXX (SEQ ID NO: 13651):SNIT (SEQ ID NO: 13572), AAPASXX (SEQ ID NO: 13646):SNIT (SEQ ID NO: 13572), HVPKPXX (SEQ ID NO: 13652):SNIT (SEQ ID NO: 13572), RVPSTXX (SEQ ID NO: 13659):SNIT (SEQ ID NO: 13572), ASAAPXX (SEQ ID NO: 13647):SNIT (SEQ ID NO: 13572), ASASPXX (SEQ ID NO: 13648):SNIT (SEQ ID NO: 13572), SSVKXQP (SEQ ID NO: 13661):SNIT (SEQ ID NO: 13572), RNVQXRP (SEQ ID NO: 13658):SNIT (SEQ ID NO: 13572), RNVQXRP (SEQ ID NO: 13658):RSVK (SEQ ID NO: 13569), KIPKAXX (SEQ ID NO: 13655):RSVK (SEQ ID NO: 13569), GIPEPXX (SEQ ID NO: 13650):RSVK (SEQ ID NO: 13569), SIPKAXX (SEQ ID NO: 13660):RSVK (SEQ ID NO: 13569), HVTKPTX (SEQ ID NO: 13653):RSVK (SEQ ID NO: 13569), YVPKPXX (SEQ ID NO: 13664):RSVK (SEQ ID NO: 13569), TVPKPXX (SEQ ID NO: 13663):RSVK (SEQ ID NO: 13569), AVPKAXX (SEQ ID NO: 13649):RSVK (SEQ ID NO: 13569), KVGKAXX (SEQ ID NO: 13656):RSVK (SEQ ID NO: 13569), KASKAXX (SEQ ID NO: 13654):RSVK (SEQ ID NO: 13569), GSAGPXX (SEQ ID NO: 13651):RSVK (SEQ ID NO: 13569), AAPASXX (SEQ ID NO: 13646):RSVK (SEQ ID NO: 13569), STPPTXX (SEQ ID NO: 13662):RSVK (SEQ ID NO: 13569), HVPKPXX (SEQ ID NO: 13652):RSVK (SEQ ID NO: 13569), RVPSTXX (SEQ ID NO: 13659):RSVK (SEQ ID NO: 13569), ASAAPXX (SEQ ID NO: 13647):RSVK (SEQ ID NO: 13569), ASASPXX (SEQ ID NO: 13648):RSVK (SEQ ID NO: 13569), NDEGLEX (SEQ ID NO: 13657):RSVK (SEQ ID NO: 13569), SSVKXQP (SEQ ID NO: 13661):RPVQ (SEQ ID NO: 13568), KIPKAXX (SEQ ID NO: 13655):RPVQ (SEQ ID NO: 13568), GIPEPXX (SEQ ID NO: 13650):RPVQ (SEQ ID NO: 13568), SIPKAXX (SEQ ID NO: 13660):RPVQ (SEQ ID NO: 13568), HVTKPTX (SEQ ID NO: 13653):RPVQ (SEQ ID NO: 13568), YVPKPXX (SEQ ID NO: 13664):RPVQ (SEQ ID NO: 13568), TVPKPXX (SEQ ID NO: 13663):RPVQ (SEQ ID NO: 13568), AVPKAXX (SEQ ID NO: 13649):RPVQ (SEQ ID NO: 13568), KVGKAXX (SEQ ID NO: 13656):RPVQ (SEQ ID NO: 13568), KASKAXX (SEQ ID NO: 13654):RPVQ (SEQ ID NO: 13568), GSAGPXX (SEQ ID NO: 13651):RPVQ (SEQ ID NO: 13568), AAPASXX (SEQ ID NO: 13646):RPVQ (SEQ ID NO: 13568), STPPTXX (SEQ ID NO: 13662):RPVQ (SEQ ID NO: 13568), HVPKPXX (SEQ ID NO: 13652):RPVQ (SEQ ID NO: 13568), RVPSTXX (SEQ ID NO: 13659):RPVQ (SEQ ID NO: 13568), ASAAPXX (SEQ ID NO: 13647):RPVQ (SEQ ID NO: 13568), ASASPXX (SEQ ID NO: 13648):RPVQ (SEQ ID NO: 13568) and NDEGLEX (SEQ ID NO: 13657):RPVQ (SEQ ID NO: 13568).

[0304] In particular, in certain embodiments, the pair PEP9:PEP1 is selected from the group consisting of GIPEPXXVPTKM (SEQ ID NO: 13703):SAIS (SEQ ID NO: 13570), HVTKPTXVPTKL (SEQ ID NO: 13729):SAIS (SEQ ID NO: 13570), YVPKPXXVPTKL (SEQ ID NO: 13799):SAIS (SEQ ID NO: 13570), TVPKPXXVPTQL (SEQ ID NO: 13791):SAIS (SEQ ID NO: 13570), AVPKAXXVPTKL (SEQ ID NO: 13695):SAIS (SEQ ID NO: 13570), KVGKAXXVPTKL (SEQ ID NO: 13753):SAIS (SEQ ID NO: 13570), KASKAXXVPTKL (SEQ ID NO: 13737):SAIS (SEQ ID NO: 13570), GSAGPXXVPTKM (SEQ ID NO: 13711):SAIS (SEQ ID NO: 13570), AAPASXXVPTRL (SEQ ID NO: 13671):SAIS (SEQ ID NO: 13570), STPPTXXVPTRL (SEQ ID NO: 13783):SAIS (SEQ ID NO: 13570), HVPKPXXVPTKL (SEQ ID NO: 13719):SAIS (SEQ ID NO: 13570), RVPSTXXVPTKT (SEQ ID NO: 13765):SAIS (SEQ ID NO: 13570), ASAAPXXVPTAL (SEQ ID NO: 13679):SAIS (SEQ ID NO: 13570), ASASPXXVPTDL (SEQ ID NO: 13687):SAIS (SEQ ID NO: 13570), GIPEPXXVPEKM (SEQ ID NO: 13701):SAIS (SEQ ID NO: 13570), HVTKPTXAPTKL (SEQ ID NO: 13721):SAIS (SEQ ID NO: 13570), YVPKPXXAPTKL (SEQ ID NO: 13793):SAIS (SEQ ID NO: 13570), TVPKPXXAPTQL (SEQ ID NO: 13785):SAIS (SEQ ID NO: 13570), AVPKAXXAPTKL (SEQ ID NO: 13689):SAIS (SEQ ID NO: 13570), GSAGPXXTPTKM (SEQ ID NO: 13707):SAIS (SEQ ID NO: 13570), AAPASXXVPARL (SEQ ID NO: 13668):SAIS (SEQ ID NO: 13570), HVPKPXXAPTKL (SEQ ID NO: 13713):SAIS (SEQ ID NO: 13570), RVPSTXXAPVKT (SEQ ID NO: 13760):SAIS (SEQ ID NO: 13570), ASAAPXXVPQAL (SEQ ID NO: 13678):SAIS (SEQ ID NO: 13570), ASASPXXVSQDL (SEQ ID NO: 13688):SAIS (SEQ ID NO: 13570), ASASPXXVPQDL (SEQ ID NO: 13686):SAIS (SEQ ID NO: 13570), SSVKXQPSRVHH (SEQ ID NO: 13775):SAIS (SEQ ID NO: 13570), RNVQXRPTQVQL (SEQ ID NO: 13758):SAIS (SEQ ID NO: 13570), KIPKAXXVPEEL (SEQ ID NO: 13743):SSLS (SEQ ID NO: 13575), SIPKAXXVPEEL (SEQ ID NO: 13771):SSLS (SEQ ID NO: 13575), HVTKPTXVPEKL (SEQ ID NO: 13727):SSLS (SEQ ID NO: 13575), YVPKPXXVPEKL (SEQ ID NO: 13797):SSLS (SEQ ID NO: 13575), TVPKPXXVPEQL (SEQ ID NO: 13789):SSLS (SEQ ID NO: 13575), AVPKAXXVPEKL (SEQ ID NO: 13693):SSLS (SEQ ID NO: 13575), KVGKAXXVPEKL (SEQ ID NO: 13751):SSLS (SEQ ID NO: 13575), KASKAXXVPEKL (SEQ ID NO: 13735):SSLS (SEQ ID NO: 13575), GSAGPXXVPEKM (SEQ ID NO: 13709):SSLS (SEQ ID NO: 13575), AAPASXXVPERL (SEQ ID NO: 13669):SSLS (SEQ ID NO: 13575), STPPTXXVPERL (SEQ ID NO: 13781):SSLS (SEQ ID NO: 13575), HVPKPXXVPEKL (SEQ ID NO: 13717):SSLS (SEQ ID NO: 13575), RVPSTXXVPEKT (SEQ ID NO: 13763):SSLS (SEQ ID NO: 13575), ASAAPXXVPEAL (SEQ ID NO: 13677):SSLS (SEQ ID NO: 13575), ASASPXXVPEDL (SEQ ID NO: 13685):SSLS (SEQ ID NO: 13575), KIPKAXXVPTEL (SEQ ID NO: 13745):SSLS (SEQ ID NO: 13575), SIPKAXXVPTEL (SEQ ID NO: 13773):SSLS (SEQ ID NO: 13575), HVTKPTXAPTKL (SEQ ID NO: 13721):SSLS (SEQ ID NO: 13575), YVPKPXXAPTKL (SEQ ID NO: 13793):SSLS (SEQ ID NO: 13575), TVPKPXXAPTQL (SEQ ID NO: 13785):SSLS (SEQ ID NO: 13575), AVPKAXXAPTKL (SEQ ID NO: 13689):SSLS (SEQ ID NO: 13575), KVGKAXXVPTKL (SEQ ID NO: 13753):SSLS (SEQ ID NO: 13575), KASKAXXVPTKL (SEQ ID NO: 13737):SSLS (SEQ ID NO: 13575), GSAGPXXTPTKM (SEQ ID NO: 13707):SSLS (SEQ ID NO: 13575), AAPASXXVPARL (SEQ ID NO: 13668):SSLS (SEQ ID NO: 13575), STPPTXXVPTRL (SEQ ID NO: 13783):SSLS (SEQ ID NO: 13575), HVPKPXXAPTKL (SEQ ID NO: 13713):SSLS (SEQ ID NO: 13575), RVPSTXXAPVKT (SEQ ID NO: 13760):SSLS (SEQ ID NO: 13575), ASAAPXXVPQAL (SEQ ID NO: 13678):SSLS (SEQ ID NO: 13575), ASASPXXVSQDL (SEQ ID NO: 13688):SSLS (SEQ ID NO: 13575), ASASPXXVPQDL (SEQ ID NO: 13686):SSLS (SEQ ID NO: 13575), NDEGLEXVPTEE (SEQ ID NO: 13755):SSLS (SEQ ID NO: 13575), NDEGLEXVPTGQ (SEQ ID NO: 13756):SSLS (SEQ ID NO: 13575), SSVKXQPSRVHH (SEQ ID NO: 13775):SSLS (SEQ ID NO: 13575), RNVQXRPTQVQL (SEQ ID NO: 13758):SSLS (SEQ ID NO: 13575), KIPKAXXAPTEL (SEQ ID NO: 13739):NAIS (SEQ ID NO: 13567), GIPEPXXAPTKM (SEQ ID NO: 13697):NAIS (SEQ ID NO: 13567), SIPKAXXAPTEL (SEQ ID NO: 13767):NAIS (SEQ ID NO: 13567), AVPKAXXAPTKL (SEQ ID NO: 13689):NAIS (SEQ ID NO: 13567), KVGKAXXAPTKL (SEQ ID NO: 13747):NAIS (SEQ ID NO: 13567), KASKAXXAPTKL (SEQ ID NO: 13731):NAIS (SEQ ID NO: 13567), GSAGPXXAPTKM (SEQ ID NO: 13705):NAIS (SEQ ID NO: 13567), AAPASXXAPTRL (SEQ ID NO: 13665):NAIS (SEQ ID NO: 13567), STPPTXXAPTRL (SEQ ID NO: 13777):NAIS (SEQ ID NO: 13567), RVPSTXXAPTKT (SEQ ID NO: 13759):NAIS (SEQ ID NO: 13567), ASAAPXXAPTAL (SEQ ID NO: 13673):NAIS (SEQ ID NO: 13567), ASASPXXAPTDL (SEQ ID NO: 13681):NAIS (SEQ ID NO: 13567), KIPKAXXVPTEL (SEQ ID NO: 13745):NAIS (SEQ ID NO: 13567), GIPEPXXVPEKM (SEQ ID NO: 13701):NAIS (SEQ ID NO: 13567), SIPKAXXVPTEL (SEQ ID NO: 13773):NAIS (SEQ ID NO: 13567), KVGKAXXVPTKL (SEQ ID NO: 13753):NAIS (SEQ ID NO: 13567), KASKAXXVPTKL (SEQ ID NO: 13737):NAIS (SEQ ID NO: 13567), GSAGPXXTPTKM (SEQ ID NO: 13707):NAIS (SEQ ID NO: 13567), AAPASXXVPARL (SEQ ID NO: 13668):NAIS (SEQ ID NO: 13567), STPPTXXVPTRL (SEQ ID NO: 13783):NAIS (SEQ ID NO: 13567), RVPSTXXAPVKT (SEQ ID NO: 13760):NAIS (SEQ ID NO: 13567), ASAAPXXVPQAL (SEQ ID NO: 13678):NAIS (SEQ ID NO: 13567), ASASPXXVSQDL (SEQ ID NO: 13688):NAIS (SEQ ID NO: 13567), ASASPXXVPQDL (SEQ ID NO: 13686):NAIS (SEQ ID NO: 13567), NDEGLEXVPTEE (SEQ ID NO: 13755):NAIS (SEQ ID NO: 13567), NDEGLEXVPTGQ (SEQ ID NO: 13756):NAIS (SEQ ID NO: 13567), SSVKXQPSRVHH (SEQ ID NO: 13775):NAIS (SEQ ID NO: 13567), RNVQXRPTQVQL (SEQ ID NO: 13758):NAIS (SEQ ID NO: 13567), KIPKAXXAPTEL (SEQ ID NO: 13739):SATS (SEQ ID NO: 13571), GIPEPXXAPTKM (SEQ ID NO: 13697):SATS (SEQ ID NO: 13571), SIPKAXXAPTEL (SEQ ID NO: 13767):SATS (SEQ ID NO: 13571), HVTKPTXAPTKL (SEQ ID NO: 13721):SATS (SEQ ID NO: 13571), YVPKPXXAPTKL (SEQ ID NO: 13793):SATS (SEQ ID NO: 13571), TVPKPXXAPTQL (SEQ ID NO: 13785):SATS (SEQ ID NO: 13571), KVGKAXXAPTKL (SEQ ID NO: 13747):SATS (SEQ ID NO: 13571), KASKAXXAPTKL (SEQ ID NO: 13731):SATS (SEQ ID NO: 13571), GSAGPXXAPTKM (SEQ ID NO: 13705):SATS (SEQ ID NO: 13571), AAPASXXAPTRL (SEQ ID NO: 13665):SATS (SEQ ID NO: 13571), STPPTXXAPTRL (SEQ ID NO: 13777):SATS (SEQ ID NO: 13571), HVPKPXXAPTKL (SEQ ID NO: 13713):SATS (SEQ ID NO: 13571), RVPSTXXAPTKT (SEQ ID NO: 13759):SATS (SEQ ID NO: 13571), ASAAPXXAPTAL (SEQ ID NO: 13673):SATS (SEQ ID NO: 13571), ASASPXXAPTDL (SEQ ID NO: 13681):SATS (SEQ ID NO: 13571), KIPKAXXVPTEL (SEQ ID NO: 13745):SATS (SEQ ID NO: 13571), GIPEPXXVPEKM (SEQ ID NO: 13701):SATS (SEQ ID NO: 13571), SIPKAXXVPTEL (SEQ ID NO: 13773):SATS (SEQ ID NO: 13571), KVGKAXXVPTKL (SEQ ID NO: 13753):SATS (SEQ ID NO: 13571), KASKAXXVPTKL (SEQ ID NO: 13737):SATS (SEQ ID NO: 13571), GSAGPXXTPTKM (SEQ ID NO: 13707):SATS (SEQ ID NO: 13571), AAPASXXVPARL (SEQ ID NO: 13668):SATS (SEQ ID NO: 13571), STPPTXXVPTRL (SEQ ID NO: 13783):SATS (SEQ ID NO: 13571), RVPSTXXAPVKT (SEQ ID NO: 13760):SATS (SEQ ID NO: 13571), ASAAPXXVPQAL (SEQ ID NO: 13678):SATS (SEQ ID NO: 13571), ASASPXXVSQDL (SEQ ID NO: 13688):SATS (SEQ ID NO: 13571), ASASPXXVPQDL (SEQ ID NO: 13686):SATS (SEQ ID NO: 13571), NDEGLEXVPTEE (SEQ ID NO: 13755):SATS (SEQ ID NO: 13571), NDEGLEXVPTGQ (SEQ ID NO: 13756):SATS (SEQ ID NO: 13571), SSVKXQPSRVHH (SEQ ID NO: 13775):SATS (SEQ ID NO: 13571), RNVQXRPTQVQL (SEQ ID NO: 13758):SATS (SEQ ID NO: 13571), KIPKAXXVPTEL (SEQ ID NO: 13745):SPIS (SEQ ID NO: 13574), GIPEPXXVPTKM (SEQ ID NO: 13703):SPIS (SEQ ID NO: 13574), SIPKAXXVPTEL (SEQ ID NO: 13773):SPIS (SEQ ID NO: 13574), HVTKPTXVPTKL (SEQ ID NO: 13729):SPIS (SEQ ID NO: 13574), YVPKPXXVPTKL (SEQ ID NO: 13799):SPIS (SEQ ID NO: 13574), TVPKPXXVPTQL (SEQ ID NO: 13791):SPIS (SEQ ID NO: 13574), AVPKAXXVPTKL (SEQ ID NO: 13695):SPIS (SEQ ID NO: 13574), KASKAXXVPTKL (SEQ ID NO: 13737):SPIS (SEQ ID NO: 13574), GSAGPXXVPTKM (SEQ ID NO: 13711):SPIS (SEQ ID NO: 13574), AAPASXXVPTRL (SEQ ID NO: 13671):SPIS (SEQ ID NO: 13574), STPPTXXVPTRL (SEQ ID NO: 13783):SPIS (SEQ ID NO: 13574), HVPKPXXVPTKL (SEQ ID NO: 13719):SPIS (SEQ ID NO: 13574), RVPSTXXVPTKT (SEQ ID NO: 13765):SPIS (SEQ ID NO: 13574), ASAAPXXVPTAL (SEQ ID NO: 13679):SPIS (SEQ ID NO: 13574), ASASPXXVPTDL (SEQ ID NO: 13687):SPIS (SEQ ID NO: 13574), GIPEPXXVPEKM (SEQ ID NO: 13701):SPIS (SEQ ID NO: 13574), HVTKPTXAPTKL (SEQ ID NO: 13721):SPIS (SEQ ID NO: 13574), YVPKPXXAPTKL (SEQ ID NO: 13793):SPIS (SEQ ID NO: 13574), TVPKPXXAPTQL (SEQ ID NO: 13785):SPIS (SEQ ID NO: 13574), AVPKAXXAPTKL (SEQ ID NO: 13689):SPIS (SEQ ID NO: 13574), GSAGPXXTPTKM (SEQ ID NO: 13707):SPIS (SEQ ID NO: 13574), AAPASXXVPARL (SEQ ID NO: 13668):SPIS (SEQ ID NO: 13574), HVPKPXXAPTKL (SEQ ID NO: 13713):SPIS (SEQ ID NO: 13574), RVPSTXXAPVKT (SEQ ID NO: 13760):SPIS (SEQ ID NO: 13574), ASAAPXXVPQAL (SEQ ID NO: 13678):SPIS (SEQ ID NO: 13574), ASASPXXVSQDL (SEQ ID NO: 13688):SPIS (SEQ ID NO: 13574), ASASPXXVPQDL (SEQ ID NO: 13686):SPIS (SEQ ID NO: 13574), SSVKXQPSRVHH (SEQ ID NO: 13775):SPIS (SEQ ID NO: 13574), RNVQXRPTQVQL (SEQ ID NO: 13758):SPIS (SEQ ID NO: 13574), KIPKAXXVPTEL (SEQ ID NO: 13745):EPIS (SEQ ID NO: 13563), GIPEPXXVPTKM (SEQ ID NO: 13703):EPIS (SEQ ID NO: 13563), SIPKAXXVPTEL (SEQ ID NO: 13773):EPIS (SEQ ID NO: 13563), HVTKPTXVPTKL (SEQ ID NO: 13729):EPIS (SEQ ID NO: 13563), YVPKPXXVPTKL (SEQ ID NO: 13799):EPIS (SEQ ID NO: 13563), TVPKPXXVPTQL (SEQ ID NO: 13791):EPIS (SEQ ID NO: 13563), AVPKAXXVPTKL (SEQ ID NO: 13695):EPIS (SEQ ID NO: 13563), KVGKAXXVPTKL (SEQ ID NO: 13753):EPIS (SEQ ID NO: 13563), GSAGPXXVPTKM (SEQ ID NO: 13711):EPIS (SEQ ID NO: 13563), AAPASXXVPTRL (SEQ ID NO: 13671):EPIS (SEQ ID NO: 13563), STPPTXXVPTRL (SEQ ID NO: 13783):EPIS (SEQ ID NO: 13563), HVPKPXXVPTKL (SEQ ID NO: 13719):EPIS (SEQ ID NO: 13563), RVPSTXXVPTKT (SEQ ID NO: 13765):EPIS (SEQ ID NO: 13563), ASAAPXXVPTAL (SEQ ID NO: 13679):EPIS (SEQ ID NO: 13563), ASASPXXVPTDL (SEQ ID NO: 13687):EPIS (SEQ ID NO: 13563), GIPEPXXVPEKM (SEQ ID NO: 13701):EPIS (SEQ ID NO: 13563), HVTKPTXAPTKL (SEQ ID NO: 13721):EPIS (SEQ ID NO: 13563), YVPKPXXAPTKL (SEQ ID NO: 13793):EPIS (SEQ ID NO: 13563), TVPKPXXAPTQL (SEQ ID NO: 13785):EPIS (SEQ ID NO: 13563), AVPKAXXAPTKL (SEQ ID NO: 13689):EPIS (SEQ ID NO: 13563), GSAGPXXTPTKM (SEQ ID NO: 13707):EPIS (SEQ ID NO: 13563), AAPASXXVPARL (SEQ ID NO: 13668):EPIS (SEQ ID NO: 13563), HVPKPXXAPTKL (SEQ ID NO: 13713):EPIS (SEQ ID NO: 13563), RVPSTXXAPVKT (SEQ ID NO: 13760):EPIS (SEQ ID NO: 13563), ASAAPXXVPQAL (SEQ ID NO: 13678):EPIS (SEQ ID NO: 13563), ASASPXXVSQDL (SEQ ID NO: 13688):EPIS (SEQ ID NO: 13563), ASASPXXVPQDL (SEQ ID NO: 13686):EPIS (SEQ ID NO: 13563), SSVKXQPSRVHH (SEQ ID NO: 13775):EPIS (SEQ ID NO: 13563), RNVQXRPTQVQL (SEQ ID NO: 13758):EPIS (SEQ ID NO: 13563), KIPKAXXTPTEL (SEQ ID NO: 13741):SPIN (SEQ ID NO: 13573), GIPEPXXTPTKM (SEQ ID NO: 13699):SPIN (SEQ ID NO: 13573), SIPKAXXTPTEL (SEQ ID NO: 13769):SPIN (SEQ ID NO: 13573), HVTKPTXTPTKL (SEQ ID NO: 13724):SPIN (SEQ ID NO: 13573), YVPKPXXTPTKL (SEQ ID NO: 13795):SPIN (SEQ ID NO: 13573), TVPKPXXTPTQL (SEQ ID NO: 13787):SPIN (SEQ ID NO: 13573), AVPKAXXTPTKL (SEQ ID NO: 13691):SPIN (SEQ ID NO: 13573), KVGKAXXTPTKL (SEQ ID NO: 13749):SPIN (SEQ ID NO: 13573), KASKAXXTPTKL (SEQ ID NO: 13733):SPIN (SEQ ID NO: 13573), AAPASXXTPTRL (SEQ ID NO: 13667):SPIN (SEQ ID NO: 13573), STPPTXXTPTRL (SEQ ID NO: 13779):SPIN (SEQ ID NO: 13573), HVPKPXXTPTKL (SEQ ID NO: 13715):SPIN (SEQ ID NO: 13573), RVPSTXXTPTKT (SEQ ID NO: 13761):SPIN (SEQ ID NO: 13573), ASAAPXXTPTAL (SEQ ID NO: 13675):SPIN (SEQ ID NO: 13573), ASASPXXTPTDL (SEQ ID NO: 13683):SPIN (SEQ ID NO: 13573), KIPKAXXVPTEL (SEQ ID NO: 13745):SPIN (SEQ ID NO: 13573), GIPEPXXVPEKM (SEQ ID NO: 13701):SPIN (SEQ ID NO: 13573), SIPKAXXVPTEL (SEQ ID NO: 13773):SPIN (SEQ ID NO: 13573), HVTKPTXAPTKL (SEQ ID NO: 13721):SPIN (SEQ ID NO: 13573), YVPKPXXAPTKL (SEQ ID NO: 13793):SPIN (SEQ ID NO: 13573), TVPKPXXAPTQL (SEQ ID NO: 13785):SPIN (SEQ ID NO: 13573), AVPKAXXAPTKL (SEQ ID NO: 13689):SPIN (SEQ ID NO: 13573), KVGKAXXVPTKL (SEQ ID NO: 13753):SPIN (SEQ ID NO: 13573), KASKAXXVPTKL (SEQ ID NO: 13737):SPIN (SEQ ID NO: 13573), AAPASXXVPARL (SEQ ID NO: 13668):SPIN (SEQ ID NO: 13573), STPPTXXVPTRL (SEQ ID NO: 13783):SPIN (SEQ ID NO: 13573), HVPKPXXAPTKL (SEQ ID NO: 13713):SPIN (SEQ ID NO: 13573), RVPSTXXAPVKT (SEQ ID NO: 13760):SPIN (SEQ ID NO: 13573), ASAAPXXVPQAL (SEQ ID NO: 13678):SPIN (SEQ ID NO: 13573), ASASPXXVSQDL (SEQ ID NO: 13688):SPIN (SEQ ID NO: 13573), ASASPXXVPQDL (SEQ ID NO: 13686):SPIN (SEQ ID NO: 13573), NDEGLEXVPTEE (SEQ ID NO: 13755):SPIN (SEQ ID NO: 13573), NDEGLEXVPTGQ (SEQ ID NO: 13756):SPIN (SEQ ID NO: 13573), SSVKXQPSRVHH (SEQ ID NO: 13775):SPIN (SEQ ID NO: 13573), RNVQXRPTQVQL (SEQ ID NO: 13758):SPIN (SEQ ID NO: 13573), KIPKAXXVPAEL (SEQ ID NO: 13742):SPIS (SEQ ID NO: 13574), GIPEPXXVPAKM (SEQ ID NO: 13700):SPIS (SEQ ID NO: 13574), SIPKAXXVPAEL (SEQ ID NO: 13770):SPIS (SEQ ID NO: 13574), HVTKPTXVPAKL (SEQ ID NO: 13726):SPIS (SEQ ID NO: 13574), YVPKPXXVPAKL (SEQ ID NO: 13796):SPIS (SEQ ID NO: 13574), TVPKPXXVPAQL (SEQ ID NO: 13788):SPIS (SEQ ID NO: 13574), AVPKAXXVPAKL (SEQ ID NO: 13692):SPIS (SEQ ID NO: 13574), KVGKAXXVPAKL (SEQ ID NO: 13750):SPIS (SEQ ID NO: 13574), KASKAXXVPAKL (SEQ ID NO: 13734):SPIS (SEQ ID NO: 13574), GSAGPXXVPAKM (SEQ ID NO: 13708):SPIS (SEQ ID NO: 13574), STPPTXXVPARL (SEQ ID NO: 13780):SPIS (SEQ ID NO: 13574), HVPKPXXVPAKL (SEQ ID NO: 13716):SPIS (SEQ ID NO: 13574), RVPSTXXVPAKT (SEQ ID NO: 13762):SPIS (SEQ ID NO: 13574), ASAAPXXVPAAL (SEQ ID NO: 13676):SPIS (SEQ ID NO: 13574), ASASPXXVPADL (SEQ ID NO: 13684):SPIS (SEQ ID NO: 13574), KVGKAXXVPTKL (SEQ ID NO: 13753):SPIS (SEQ ID NO: 13574), NDEGLEXVPTEE (SEQ ID NO: 13755):SPIS (SEQ ID NO: 13574), NDEGLEXVPTGQ (SEQ ID NO: 13756):SPIS (SEQ ID NO: 13574), KIPKAXXAPVEL (SEQ ID NO: 13740):KPLS (SEQ ID NO: 13566), GIPEPXXAPVKM (SEQ ID NO: 13698):KPLS (SEQ ID NO: 13566), SIPKAXXAPVEL (SEQ ID NO: 13768):KPLS (SEQ ID NO: 13566), HVTKPTXAPVKL (SEQ ID NO: 13722):KPLS (SEQ ID NO: 13566), YVPKPXXAPVKL (SEQ ID NO: 13794):KPLS (SEQ ID NO: 13566), TVPKPXXAPVQL (SEQ ID NO: 13786):KPLS (SEQ ID NO: 13566), AVPKAXXAPVKL (SEQ ID NO: 13690):KPLS (SEQ ID NO: 13566), KVGKAXXAPVKL (SEQ ID NO: 13748):KPLS (SEQ ID NO: 13566), KASKAXXAPVKL (SEQ ID NO: 13732):KPLS (SEQ ID NO: 13566), GSAGPXXAPVKM (SEQ ID NO: 13706):KPLS (SEQ ID NO: 13566), AAPASXXAPVRL (SEQ ID NO: 13666):KPLS (SEQ ID NO: 13566), STPPTXXAPVRL (SEQ ID NO: 13778):KPLS (SEQ ID NO: 13566), HVPKPXXAPVKL (SEQ ID NO: 13714):KPLS (SEQ ID NO: 13566), ASAAPXXAPVAL (SEQ ID NO: 13674):KPLS (SEQ ID NO: 13566), ASASPXXAPVDL (SEQ ID NO: 13682):KPLS (SEQ ID NO: 13566), KIPKAXXVPTEL (SEQ ID NO: 13745):KPLS (SEQ ID NO: 13566), GIPEPXXVPEKM (SEQ ID NO: 13701):KPLS (SEQ ID NO: 13566), SIPKAXXVPTEL (SEQ ID NO: 13773):KPLS (SEQ ID NO: 13566), HVTKPTXAPTKL (SEQ ID NO: 13721):KPLS (SEQ ID NO: 13566), YVPKPXXAPTKL (SEQ ID NO: 13793):KPLS (SEQ ID NO: 13566), TVPKPXXAPTQL (SEQ ID NO: 13785):KPLS (SEQ ID NO: 13566), AVPKAXXAPTKL (SEQ ID NO: 13689):KPLS (SEQ ID NO: 13566), KVGKAXXVPTKL (SEQ ID NO: 13753):KPLS (SEQ ID NO: 13566), KASKAXXVPTKL (SEQ ID NO: 13737):KPLS (SEQ ID NO: 13566), GSAGPXXTPTKM (SEQ ID NO: 13707):KPLS (SEQ ID NO: 13566), AAPASXXVPARL (SEQ ID NO: 13668):KPLS (SEQ ID NO: 13566), STPPTXXVPTRL (SEQ ID NO: 13783):KPLS (SEQ ID NO: 13566), HVPKPXXAPTKL (SEQ ID NO: 13713):KPLS (SEQ ID NO: 13566), ASAAPXXVPQAL (SEQ ID NO: 13678):KPLS (SEQ ID NO: 13566), ASASPXXVSQDL (SEQ ID NO: 13688):KPLS (SEQ ID NO: 13566), ASASPXXVPQDL (SEQ ID NO: 13686):KPLS (SEQ ID NO: 13566), NDEGLEXVPTEE (SEQ ID NO: 13755):KPLS (SEQ ID NO: 13566), NDEGLEXVPTGQ (SEQ ID NO: 13756):KPLS (SEQ ID NO: 13566), SSVKXQPSRVHH (SEQ ID NO: 13775):KPLS (SEQ ID NO: 13566), RNVQXRPTQVQL (SEQ ID NO: 13758):KPLS (SEQ ID NO: 13566), KIPKAXXVPQEL (SEQ ID NO: 13744):EPLP (SEQ ID NO: 13564), GIPEPXXVPQKM (SEQ ID NO: 13702):EPLP (SEQ ID NO: 13564), SIPKAXXVPQEL (SEQ ID NO: 13772):EPLP (SEQ ID NO: 13564), HVTKPTXVPQKL (SEQ ID NO: 13728):EPLP (SEQ ID NO: 13564), YVPKPXXVPQKL (SEQ ID NO: 13798):EPLP (SEQ ID NO: 13564), TVPKPXXVPQQL (SEQ ID NO: 13790):EPLP (SEQ ID NO: 13564), AVPKAXXVPQKL (SEQ ID NO: 13694):EPLP (SEQ ID NO: 13564), KVGKAXXVPQKL (SEQ ID NO: 13752):EPLP (SEQ ID NO: 13564), KASKAXXVPQKL (SEQ ID NO: 13736):EPLP (SEQ ID NO: 13564), GSAGPXXVPQKM (SEQ ID NO: 13710):EPLP (SEQ ID NO: 13564), AAPASXXVPQRL (SEQ ID NO: 13670):EPLP (SEQ ID NO: 13564), STPPTXXVPQRL (SEQ ID NO: 13782):EPLP (SEQ ID NO: 13564), HVPKPXXVPQKL (SEQ ID NO: 13718):EPLP (SEQ ID NO: 13564), RVPSTXXVPQKT (SEQ ID NO: 13764):EPLP (SEQ ID NO: 13564), ASASPXXVPQDL (SEQ ID NO: 13686):EPLP (SEQ ID NO: 13564), KIPKAXXVPTEL (SEQ ID NO: 13745):EPLP (SEQ ID NO: 13564), GIPEPXXVPEKM (SEQ ID NO: 13701):EPLP (SEQ ID NO: 13564), SIPKAXXVPTEL (SEQ ID NO: 13773):EPLP (SEQ ID NO: 13564), HVTKPTXAPTKL (SEQ ID NO: 13721):EPLP (SEQ ID NO: 13564), YVPKPXXAPTKL (SEQ ID NO: 13793):EPLP (SEQ ID NO: 13564), TVPKPXXAPTQL (SEQ ID NO: 13785):EPLP (SEQ ID NO: 13564), AVPKAXXAPTKL (SEQ ID NO: 13689):EPLP (SEQ ID NO: 13564), KVGKAXXVPTKL (SEQ ID NO: 13753):EPLP (SEQ ID NO: 13564), KASKAXXVPTKL (SEQ ID NO: 13737):EPLP (SEQ ID NO: 13564), GSAGPXXTPTKM (SEQ ID NO: 13707):EPLP (SEQ ID NO: 13564), AAPASXXVPARL (SEQ ID NO: 13668):EPLP (SEQ ID NO: 13564), STPPTXXVPTRL (SEQ ID NO: 13783):EPLP (SEQ ID NO: 13564), HVPKPXXAPTKL (SEQ ID NO: 13713):EPLP (SEQ ID NO: 13564), RVPSTXXAPVKT (SEQ ID NO: 13760):EPLP (SEQ ID NO: 13564), ASASPXXVSQDL (SEQ ID NO: 13688):EPLP (SEQ ID NO: 13564), NDEGLEXVPTEE (SEQ ID NO: 13755):EPLP (SEQ ID NO: 13564), NDEGLEXVPTGQ (SEQ ID NO: 13756):EPLP (SEQ ID NO: 13564), SSVKXQPSRVHH (SEQ ID NO: 13775):EPLP (SEQ ID NO: 13564), RNVQXRPTQVQL (SEQ ID NO: 13758):EPLP (SEQ ID NO: 13564), KIPKAXXVSQEL (SEQ ID NO: 13746):EPLT (SEQ ID NO: 13565), GIPEPXXVSQKM (SEQ ID NO: 13704):EPLT (SEQ ID NO: 13565), SIPKAXXVSQEL (SEQ ID NO: 13774):EPLT (SEQ ID NO: 13565), HVTKPTXVSQKL (SEQ ID NO: 13730):EPLT (SEQ ID NO: 13565), YVPKPXXVSQKL (SEQ ID NO: 13800):EPLT (SEQ ID NO: 13565), TVPKPXXVSQQL (SEQ ID NO: 13792):EPLT (SEQ ID NO: 13565), AVPKAXXVSQKL (SEQ ID NO: 13696):EPLT (SEQ ID NO: 13565), KVGKAXXVSQKL (SEQ ID NO: 13754):EPLT (SEQ ID NO: 13565), KASKAXXVSQKL (SEQ ID NO: 13738):EPLT (SEQ ID NO: 13565), GSAGPXXVSQKM (SEQ ID NO: 13712):EPLT (SEQ ID NO: 13565), AAPASXXVSQRL (SEQ ID NO: 13672):EPLT (SEQ ID NO: 13565), STPPTXXVSQRL (SEQ ID NO: 13784):EPLT (SEQ ID NO: 13565), HVPKPXXVSQKL (SEQ ID NO: 13720):EPLT (SEQ ID NO: 13565), RVPSTXXVSQKT (SEQ ID NO: 13766):EPLT (SEQ ID NO: 13565), ASAAPXXVSQAL (SEQ ID NO: 13680):EPLT (SEQ ID NO: 13565), ASASPXXVSQDL (SEQ ID NO: 13688):EPLT (SEQ ID NO: 13565), KIPKAXXVPTEL (SEQ ID NO: 13745):EPLT (SEQ ID NO: 13565), GIPEPXXVPEKM (SEQ ID NO: 13701):EPLT (SEQ ID NO: 13565), SIPKAXXVPTEL (SEQ ID NO: 13773):EPLT (SEQ ID NO: 13565), HVTKPTXAPTKL (SEQ ID NO: 13721):EPLT (SEQ ID NO: 13565), YVPKPXXAPTKL (SEQ ID NO: 13793):EPLT (SEQ ID NO: 13565), TVPKPXXAPTQL (SEQ ID NO: 13785):EPLT (SEQ ID NO: 13565), AVPKAXXAPTKL (SEQ ID NO: 13689):EPLT (SEQ ID NO: 13565), KVGKAXXVPTKL (SEQ ID NO: 13753):EPLT (SEQ ID NO: 13565), KASKAXXVPTKL (SEQ ID NO: 13737):EPLT (SEQ ID NO: 13565), GSAGPXXTPTKM (SEQ ID NO: 13707):EPLT (SEQ ID NO: 13565), AAPASXXVPARL (SEQ ID NO: 13668):EPLT (SEQ ID NO: 13565), STPPTXXVPTRL (SEQ ID NO: 13783):EPLT (SEQ ID NO: 13565), HVPKPXXAPTKL (SEQ ID NO: 13713):EPLT (SEQ ID NO: 13565), RVPSTXXAPVKT (SEQ ID NO: 13760):EPLT (SEQ ID NO: 13565), ASAAPXXVPQAL (SEQ ID NO: 13678):EPLT (SEQ ID NO: 13565), NDEGLEXVPTEE (SEQ ID NO: 13755):EPLT (SEQ ID NO: 13565), NDEGLEXVPTGQ (SEQ ID NO: 13756):EPLT (SEQ ID NO: 13565), SSVKXQPSRVHH (SEQ ID NO: 13775):EPLT (SEQ ID NO: 13565), RNVQXRPTQVQL (SEQ ID NO: 13758):EPLT (SEQ ID NO: 13565), KIPKAXXVPQEL (SEQ ID NO: 13744):EPLT (SEQ ID NO: 13565), GIPEPXXVPQKM (SEQ ID NO: 13702):EPLT (SEQ ID NO: 13565), SIPKAXXVPQEL (SEQ ID NO: 13772):EPLT (SEQ ID NO: 13565), HVTKPTXVPQKL (SEQ ID NO: 13728):EPLT (SEQ ID NO: 13565), YVPKPXXVPQKL (SEQ ID NO: 13798):EPLT (SEQ ID NO: 13565), TVPKPXXVPQQL (SEQ ID NO: 13790):EPLT (SEQ ID NO: 13565), AVPKAXXVPQKL (SEQ ID NO: 13694):EPLT (SEQ ID NO: 13565), KVGKAXXVPQKL (SEQ ID NO: 13752):EPLT (SEQ ID NO: 13565), KASKAXXVPQKL (SEQ ID NO: 13736):EPLT (SEQ ID NO: 13565), GSAGPXXVPQKM (SEQ ID NO: 13710):EPLT (SEQ ID NO: 13565), AAPASXXVPQRL (SEQ ID NO: 13670):EPLT (SEQ ID NO: 13565), STPPTXXVPQRL (SEQ ID NO: 13782):EPLT (SEQ ID NO: 13565), HVPKPXXVPQKL (SEQ ID NO: 13718):EPLT (SEQ ID NO: 13565), RVPSTXXVPQKT (SEQ ID NO: 13764):EPLT (SEQ ID NO: 13565), ASASPXXVPQDL (SEQ ID NO: 13686):EPLT (SEQ ID NO: 13565), NDEGLEXVPTGQ (SEQ ID NO: 13756):SNIT (SEQ ID NO: 13572), GIPEPXXVPEKM (SEQ ID NO: 13701):SNIT (SEQ ID NO: 13572), HVTKPTXAPTKL (SEQ ID NO: 13721):SNIT (SEQ ID NO: 13572), YVPKPXXAPTKL (SEQ ID NO: 13793):SNIT (SEQ ID NO: 13572), TVPKPXXAPTQL (SEQ ID NO: 13785):SNIT (SEQ ID NO: 13572), AVPKAXXAPTKL (SEQ ID NO: 13689):SNIT (SEQ ID NO: 13572), GSAGPXXTPTKM (SEQ ID NO: 13707):SNIT (SEQ ID NO: 13572), AAPASXXVPARL (SEQ ID NO: 13668):SNIT (SEQ ID NO: 13572), HVPKPXXAPTKL (SEQ ID NO: 13713):SNIT (SEQ ID NO: 13572), RVPSTXXAPVKT (SEQ ID NO: 13760):SNIT (SEQ ID NO: 13572), ASAAPXXVPQAL (SEQ ID NO: 13678):SNIT (SEQ ID NO: 13572), ASASPXXVSQDL (SEQ ID NO: 13688):SNIT (SEQ ID NO: 13572), ASASPXXVPQDL (SEQ ID NO: 13686):SNIT (SEQ ID NO: 13572), SSVKXQPSRVHH (SEQ ID NO: 13775):SNIT (SEQ ID NO: 13572), RNVQXRPTQVQL (SEQ ID NO: 13758):SNIT (SEQ ID NO: 13572), RNVQXRPSRVQL (SEQ ID NO: 13757):RSVK (SEQ ID NO: 13569), KIPKAXXVPTEL (SEQ ID NO: 13745):RSVK (SEQ ID NO: 13569), GIPEPXXVPEKM (SEQ ID NO: 13701):RSVK (SEQ ID NO: 13569), SIPKAXXVPTEL (SEQ ID NO: 13773):RSVK (SEQ ID NO: 13569), HVTKPTXAPTKL (SEQ ID NO: 13721):RSVK (SEQ ID NO: 13569), YVPKPXXAPTKL (SEQ ID NO: 13793):RSVK (SEQ ID NO: 13569), TVPKPXXAPTQL (SEQ ID NO: 13785):RSVK (SEQ ID NO: 13569), AVPKAXXAPTKL (SEQ ID NO: 13689):RSVK (SEQ ID NO: 13569), KVGKAXXVPTKL (SEQ ID NO: 13753):RSVK (SEQ ID NO: 13569), KASKAXXVPTKL (SEQ ID NO: 13737):RSVK (SEQ ID NO: 13569), GSAGPXXTPTKM (SEQ ID NO: 13707):RSVK (SEQ ID NO: 13569), AAPASXXVPARL (SEQ ID NO: 13668):RSVK (SEQ ID NO: 13569), STPPTXXVPTRL (SEQ ID NO: 13783):RSVK (SEQ ID NO: 13569), HVPKPXXAPTKL (SEQ ID NO: 13713):RSVK (SEQ ID NO: 13569), RVPSTXXAPVKT (SEQ ID NO: 13760):RSVK (SEQ ID NO: 13569), ASAAPXXVPQAL (SEQ ID NO: 13678):RSVK (SEQ ID NO: 13569), ASASPXXVSQDL (SEQ ID NO: 13688):RSVK (SEQ ID NO: 13569), ASASPXXVPQDL (SEQ ID NO: 13686):RSVK (SEQ ID NO: 13569), NDEGLEXVPTEE (SEQ ID NO: 13755):RSVK (SEQ ID NO: 13569), NDEGLEXVPTGQ (SEQ ID NO: 13756):RSVK (SEQ ID NO: 13569), RNVQXRPTQVQL (SEQ ID NO: 13758):RSVK (SEQ ID NO: 13569), SSVKXQPTQVHH (SEQ ID NO: 13776):RPVQ (SEQ ID NO: 13568), KIPKAXXVPTEL (SEQ ID NO: 13745):RPVQ (SEQ ID NO: 13568), GIPEPXXVPEKM (SEQ ID NO: 13701):RPVQ (SEQ ID NO: 13568), SIPKAXXVPTEL (SEQ ID NO: 13773):RPVQ (SEQ ID NO: 13568), HVTKPTXAPTKL (SEQ ID NO: 13721):RPVQ (SEQ ID NO: 13568), YVPKPXXAPTKL (SEQ ID NO: 13793):RPVQ (SEQ ID NO: 13568), TVPKPXXAPTQL (SEQ ID NO: 13785):RPVQ (SEQ ID NO: 13568), AVPKAXXAPTKL (SEQ ID NO: 13689):RPVQ (SEQ ID NO: 13568), KVGKAXXVPTKL (SEQ ID NO: 13753):RPVQ (SEQ ID NO: 13568), KASKAXXVPTKL (SEQ ID NO: 13737):RPVQ (SEQ ID NO: 13568), GSAGPXXTPTKM (SEQ ID NO: 13707):RPVQ (SEQ ID NO: 13568), AAPASXXVPARL (SEQ ID NO: 13668):RPVQ (SEQ ID NO: 13568), STPPTXXVPTRL (SEQ ID NO: 13783):RPVQ (SEQ ID NO: 13568), HVPKPXXAPTKL (SEQ ID NO: 13713):RPVQ (SEQ ID NO: 13568), RVPSTXXAPVKT (SEQ ID NO: 13760):RPVQ (SEQ ID NO: 13568), ASAAPXXVPQAL (SEQ ID NO: 13678):RPVQ (SEQ ID NO: 13568), ASASPXXVSQDL (SEQ ID NO: 13688):RPVQ (SEQ ID NO: 13568), ASASPXXVPQDL (SEQ ID NO: 13686):RPVQ (SEQ ID NO: 13568), NDEGLEXVPTEE (SEQ ID NO: 13755):RPVQ (SEQ ID NO: 13568), NDEGLEXVPTGQ (SEQ ID NO: 13756):RPVQ (SEQ ID NO: 13568) and SSVKXQPSRVHH (SEQ ID NO: 13775):RPVQ (SEQ ID NO: 13568).

[0305] In particular, in certain embodiments, the pair PEP3:PEP12 is selected from the group consisting of VPT:SAIS-AA¹⁷-LYL (SEQ ID NO: 13808), VPE:SAIS-AA¹⁷-LYL (SEQ ID NO: 13808), APT:SAIS-AA¹⁷-LYL (SEQ ID NO: 13808), TPT:SAIS-AA¹⁷-LYL (SEQ ID NO: 13808), VPA:SAIS-AA¹⁷-LYL (SEQ ID NO: 13808), APV:SAIS-AA¹⁷-LYL (SEQ ID NO: 13808), VPQ:SAIS-AA¹⁷-LYL (SEQ ID NO: 13808), VSQ:SAIS-AA¹⁷-LYL (SEQ ID NO: 13808), SRV:SAIS-AA¹⁷-LYL (SEQ ID NO: 13808), TQV:SAIS-AA¹⁷-LYL (SEQ ID NO: 13808), VPE:SSLS-AA¹⁷-LFF (SEQ ID NO: 13815), VPT:SSLS-AA¹⁷-LFF (SEQ ID NO: 13815), APT:SSLS-AA¹⁷-LFF (SEQ ID NO: 13815), TPT:SSLS-AA¹⁷-LFF (SEQ ID NO: 13815), VPA:SSLS-AA¹⁷-LFF (SEQ ID NO: 13815), APV:SSLS-AA¹⁷-LFF (SEQ ID NO: 13815), VPQ:SSLS-AA¹⁷-LFF (SEQ ID NO: 13815), VSQ:SSLS-AA¹⁷-LFF (SEQ ID NO: 13815), SRV:SSLS-AA¹⁷-LFF (SEQ ID NO: 13815), TQV:SSLS-AA¹⁷-LFF (SEQ ID NO: 13815), APT:NAIS-AA¹⁷-LYF (SEQ ID NO: 13805), VPT:NAIS-AA¹⁷-LYF (SEQ ID NO: 13805), VPE:NAIS-AA¹⁷-LYF (SEQ ID NO: 13805), TPT:NAIS-AA¹⁷-LYF (SEQ ID NO: 13805), VPA:NAIS-AA¹⁷-LYF (SEQ ID NO: 13805), APV:NAIS-AA¹⁷-LYF (SEQ ID NO: 13805), VPQ:NAIS-AA¹⁷-LYF (SEQ ID NO: 13805), VSQ:NAIS-AA¹⁷-LYF (SEQ ID NO: 13805), SRV:NAIS-AA¹⁷-LYF (SEQ ID NO: 13805), TQV:NAIS-AA¹⁷-LYF (SEQ ID NO: 13805), APT:SATS-AA¹⁷-LYY (SEQ ID NO: 13809), VPT:SATS-AA¹⁷-LYY (SEQ ID NO: 13809), VPE:SATS-AA¹⁷-LYY (SEQ ID NO: 13809), TPT:SATS-AA¹⁷-LYY (SEQ ID NO: 13809), VPA:SATS-AA¹⁷-LYY (SEQ ID NO: 13809), APV:SATS-AA¹⁷-LYY (SEQ ID NO: 13809), VPQ:SATS-AA¹⁷-LYY (SEQ ID NO: 13809), VSQ:SATS-AA¹⁷-LYY (SEQ ID NO: 13809), SRV:SATS-AA¹⁷-LYY (SEQ ID NO: 13809), TQV:SATS-AA¹⁷-LYY (SEQ ID NO: 13809), VPT:SPIS-AA¹⁷-LYK (SEQ ID NO: 13814), VPE:SPIS-AA¹⁷-LYK (SEQ ID NO: 13814), APT:SPIS-AA¹⁷-LYK (SEQ ID NO: 13814), TPT:SPIS-AA¹⁷-LYK (SEQ ID NO: 13814), VPA:SPIS-AA¹⁷-LYK (SEQ ID NO: 13814), APV:SPIS-AA¹⁷-LYK (SEQ ID NO: 13814), VPQ:SPIS-AA¹⁷-LYK (SEQ ID NO: 13814), VSQ:SPIS-AA¹⁷-LYK (SEQ ID NO: 13814), SRV:SPIS-AA¹⁷-LYK (SEQ ID NO: 13814), TQV:SPIS-AA¹⁷-LYK (SEQ ID NO: 13814), VPT:EPIS-AA¹⁷-LYL (SEQ ID NO: 13801), VPE:EPIS-AA¹⁷-LYL (SEQ ID NO: 13801), APT:EPIS-AA¹⁷-LYL (SEQ ID NO: 13801), TPT:EPIS-AA¹⁷-LYL (SEQ ID NO: 13801), VPA:EPIS-AA¹⁷-LYL (SEQ ID NO: 13801), APV:EPIS-AA¹⁷-LYL (SEQ ID NO: 13801), VPQ:EPIS-AA¹⁷-LYL (SEQ ID NO: 13801), VSQ:EPIS-AA¹⁷-LYL (SEQ ID NO: 13801), SRV:EPIS-AA¹⁷-LYL (SEQ ID NO: 13801), TQV:EPIS-AA¹⁷-LYL (SEQ ID NO: 13801), TPT:SPIN-AA¹⁷-LYF (SEQ ID NO: 13811), VPT:SPIN-AA¹⁷-LYF (SEQ ID NO: 13811), VPE:SPIN-AA¹⁷-LYF (SEQ ID NO: 13811), APT:SPIN-AA¹⁷-LYF (SEQ ID NO: 13811), VPA:SPIN-AA¹⁷-LYF (SEQ ID NO: 13811), APV:SPIN-AA¹⁷-LYF (SEQ ID NO: 13811), VPQ:SPIN-AA¹⁷-LYF (SEQ ID NO: 13811), VSQ:SPIN-AA¹⁷-LYF (SEQ ID NO: 13811), SRV:SPIN-AA¹⁷-LYF (SEQ ID NO: 13811), TQV:SPIN-AA¹⁷-LYF (SEQ ID NO: 13811), VPA:SPIS-AA¹⁷-LYI (SEQ ID NO: 13813), VPT:SPIS-AA¹⁷-LYI (SEQ ID NO: 13813), VPE:SPIS-AA¹⁷-LYI (SEQ ID NO: 13813), APT:SPIS-AA¹⁷-LYI (SEQ ID NO: 13813), TPT:SPIS-AA¹⁷-LYI (SEQ ID NO: 13813), APV:SPIS-AA¹⁷-LYI (SEQ ID NO: 13813), VPQ:SPIS-AA¹⁷-LYI (SEQ ID NO: 13813), VSQ:SPIS-AA¹⁷-LYI (SEQ ID NO: 13813), SRV:SPIS-AA¹⁷-LYI (SEQ ID NO: 13813), TQV:SPIS-AA¹⁷-LYI (SEQ ID NO: 13813), VPT:SPIS-AA¹⁷-LFI (SEQ ID NO: 13812), VPE:SPIS-AA¹⁷-LFI (SEQ ID NO: 13812), APT:SPIS-AA¹⁷-LFI (SEQ ID NO: 13812), TPT:SPIS-AA¹⁷-LFI (SEQ ID NO: 13812), VPA:SPIS-AA¹⁷-LFI (SEQ ID NO: 13812), APV:SPIS-AA¹⁷-LFI (SEQ ID NO: 13812), VPQ:SPIS-AA¹⁷-LFI (SEQ ID NO: 13812), VSQ:SPIS-AA¹⁷-LFI (SEQ ID NO: 13812), SRV:SPIS-AA¹⁷-LFI (SEQ ID NO: 13812), TQV:SPIS-AA¹⁷-LFI (SEQ ID NO: 13812), APV:KPLS-AA¹⁷-LYV (SEQ ID NO: 13804), VPT:KPLS-AA¹⁷-LYV (SEQ ID NO: 13804), VPE:KPLS-AA¹⁷-LYV (SEQ ID NO: 13804), APT:KPLS-AA¹⁷-LYV (SEQ ID NO: 13804), TPT:KPLS-AA¹⁷-LYV (SEQ ID NO: 13804), VPA:KPLS-AA¹⁷-LYV (SEQ ID NO: 13804), VPQ:KPLS-AA¹⁷-LYV (SEQ ID NO: 13804), VSQ:KPLS-AA¹⁷-LYV (SEQ ID NO: 13804), SRV:KPLS-AA¹⁷-LYV (SEQ ID NO: 13804), TQV:KPLS-AA¹⁷-LYV (SEQ ID NO: 13804), VPQ:EPLP-AA¹⁷-VYY (SEQ ID NO: 13802), VPT:EPLP-AA¹⁷-VYY (SEQ ID NO: 13802), VPE:EPLP-AA¹⁷-VYY (SEQ ID NO: 13802), APT:EPLP-AA¹⁷-VYY (SEQ ID NO: 13802), TPT:EPLP-AA¹⁷-VYY (SEQ ID NO: 13802), VPA:EPLP-AA¹⁷-VYY (SEQ ID NO: 13802), APV:EPLP-AA¹⁷-VYY (SEQ ID NO: 13802), VSQ:EPLP-AA¹⁷-VYY (SEQ ID NO: 13802), SRV:EPLP-AA¹⁷-VYY (SEQ ID NO: 13802), TQV:EPLP-AA¹⁷-VYY (SEQ ID NO: 13802), VSQ:EPLT-AA¹⁷-LYY (SEQ ID NO: 13803), VPT:EPLT-AA¹⁷-LYY (SEQ ID NO: 13803), VPE:EPLT-AA¹⁷-LYY (SEQ ID NO: 13803), APT:EPLT-AA¹⁷-LYY (SEQ ID NO: 13803), TPT:EPLT-AA¹⁷-LYY (SEQ ID NO: 13803), VPA:EPLT-AA¹⁷-LYY (SEQ ID NO: 13803), APV:EPLT-AA¹⁷-LYY (SEQ ID NO: 13803), VPQ:EPLT-AA¹⁷-LYY (SEQ ID NO: 13803), SRV:EPLT-AA¹⁷-LYY (SEQ ID NO: 13803), TQV:EPLT-AA¹⁷-LYY (SEQ ID NO: 13803), VPT:SNIT-AA¹⁷-QIM (SEQ ID NO: 13810), VPE:SNIT-AA¹⁷-QIM (SEQ ID NO: 13810), APT:SNIT-AA¹⁷-QIM (SEQ ID NO: 13810), TPT:SNIT-AA¹⁷-QIM (SEQ ID NO: 13810), VPA:SNIT-AA¹⁷-QIM (SEQ ID NO: 13810), APV:SNIT-AA¹⁷-QIM (SEQ ID NO: 13810), VPQ:SNIT-AA¹⁷-QIM (SEQ ID NO: 13810), VSQ:SNIT-AA¹⁷-QIM (SEQ ID NO: 13810), SRV:SNIT-AA¹⁷-QIM (SEQ ID NO: 13810), TQV:SNIT-AA¹⁷-QIM (SEQ ID NO: 13810), SRV:RSVK-AA¹⁷-AKV (SEQ ID NO: 13807), VPT:RSVK-AA¹⁷-AKV (SEQ ID NO: 13807), VPE:RSVK-AA¹⁷-AKV (SEQ ID NO: 13807), APT:RSVK-AA¹⁷-AKV (SEQ ID NO: 13807), TPT:RSVK-AA¹⁷-AKV (SEQ ID NO: 13807), VPA:RSVK-AA¹⁷-AKV (SEQ ID NO: 13807), APV:RSVK-AA¹⁷-AKV (SEQ ID NO: 13807), VPQ:RSVK-AA¹⁷-AKV (SEQ ID NO: 13807), VSQ:RSVK-AA¹⁷-AKV (SEQ ID NO: 13807), TQV:RSVK-AA¹⁷-AKV (SEQ ID NO: 13807), TQV:RPVQ-AA¹⁷-RKI (SEQ ID NO: 13806), VPT:RPVQ-AA¹⁷-RKI (SEQ ID NO: 13806), VPE:RPVQ-AA¹⁷-RKI (SEQ ID NO: 13806), APT:RPVQ-AA¹⁷-RKI (SEQ ID NO: 13806), TPT:RPVQ-AA¹⁷-RKI (SEQ ID NO: 13806), VPA:RPVQ-AA¹⁷-RKI (SEQ ID NO: 13806), APV:RPVQ-AA¹⁷-RKI (SEQ ID NO: 13806), VPQ:RPVQ-AA¹⁷-RKI (SEQ ID NO: 13806), VSQ:RPVQ-AA¹⁷-RKI (SEQ ID NO: 13806) and SRV:RPVQ-AA¹⁷-RKI (SEQ ID NO: 13806); and wherein AA¹⁷ is selected from the group consisting of G, A, V, L, I, P, F, M, W, T and S (in particular is selected from the group consisting of M, I, L, V and T).

[0306] In particular, in certain embodiments, the pair PEP12:PEP5 is selected from the group consisting of VPTKM (SEQ ID NO: 13634):SAIS-AA¹⁷-LYL (SEQ ID NO: 13808), VPTKL (SEQ ID NO: 13633):SAIS-AA¹⁷-LYL (SEQ ID NO: 13808), VPTQL (SEQ ID NO: 13636):SAIS-AA¹⁷-LYL (SEQ ID NO: 13808), VPTRL (SEQ ID NO: 13637):SAIS-AA¹⁷-LYL (SEQ ID NO: 13808), VPTKT (SEQ ID NO: 13635):SAIS-AA¹⁷-LYL (SEQ ID NO: 13808), VPTAL (SEQ ID NO: 13628):SAIS-AA¹⁷-LYL (SEQ ID NO: 13808), VPTDL (SEQ ID NO: 13629):SAIS-AA¹⁷-LYL (SEQ ID NO: 13808), VPEKM (SEQ ID NO: 13616):SAIS-AA¹⁷-LYL (SEQ ID NO: 13808), APTKL (SEQ ID NO: 13579):SAIS-AA¹⁷-LYL (SEQ ID NO: 13808), APTQL (SEQ ID NO: 13582):SAIS-AA¹⁷-LYL (SEQ ID NO: 13808), TPTKM (SEQ ID NO: 13598):SAIS-AA¹⁷-LYL (SEQ ID NO: 13808), VPARL (SEQ ID NO: 13611):SAIS-AA¹⁷-LYL (SEQ ID NO: 13808), APVKT (SEQ ID NO: 13589):SAIS-AA¹⁷-LYL (SEQ ID NO: 13808), VPQAL (SEQ ID NO: 13620):SAIS-AA¹⁷-LYL (SEQ ID NO: 13808), VSQDL (SEQ ID NO: 13639):SAIS-AA¹⁷-LYL (SEQ ID NO: 13808), VPQDL (SEQ ID NO: 13621):SAIS-AA¹⁷-LYL (SEQ ID NO: 13808), SRVHH (SEQ ID NO: 13592):SAIS-AA¹⁷-LYL (SEQ ID NO: 13808), TQVQL (SEQ ID NO: 13603):SAIS-AA¹⁷-LYL (SEQ ID NO: 13808), VPEEL (SEQ ID NO: 13614):SSLS-AA¹⁷-LFF (SEQ ID NO: 13815), VPEKL (SEQ ID NO: 13615):SSLS-AA¹⁷-LFF (SEQ ID NO: 13815), VPEQL (SEQ ID NO: 13618):SSLS-AA¹⁷-LFF (SEQ ID NO: 13815), VPEKM (SEQ ID NO: 13616):SSLS-AA¹⁷-LFF (SEQ ID NO: 13815), VPERL (SEQ ID NO: 13619):SSLS-AA¹⁷-LFF (SEQ ID NO: 13815), VPEKT (SEQ ID NO: 13617):SSLS-AA¹⁷-LFF (SEQ ID NO: 13815), VPEAL (SEQ ID NO: 13612):SSLS-AA¹⁷-LFF (SEQ ID NO: 13815), VPEDL (SEQ ID NO: 13613):SSLS-AA¹⁷-LFF (SEQ ID NO: 13815), VPTEL (SEQ ID NO: 13631):SSLS-AA¹⁷-LFF (SEQ ID NO: 13815), APTKL (SEQ ID NO: 13579):SSLS-AA¹⁷-LFF (SEQ ID NO: 13815), APTQL (SEQ ID NO: 13582):SSLS-AA¹⁷-LFF (SEQ ID NO: 13815), VPTKL (SEQ ID NO: 13633):SSLS-AA¹⁷-LFF (SEQ ID NO: 13815), TPTKM (SEQ ID NO: 13598):SSLS-AA¹⁷-LFF (SEQ ID NO: 13815), VPARL (SEQ ID NO: 13611):SSLS-AA¹⁷-LFF (SEQ ID NO: 13815), VPTRL (SEQ ID NO: 13637):SSLS-AA¹⁷-LFF (SEQ ID NO: 13815), APVKT (SEQ ID NO: 13589):SSLS-AA¹⁷-LFF (SEQ ID NO: 13815), VPQAL (SEQ ID NO: 13620):SSLS-AA¹⁷-LFF (SEQ ID NO: 13815), VSQDL (SEQ ID NO: 13639):SSLS-AA¹⁷-LFF (SEQ ID NO: 13815), VPQDL (SEQ ID NO: 13621):SSLS-AA¹⁷-LFF (SEQ ID NO: 13815), VPTEE (SEQ ID NO: 13630):SSLS-AA¹⁷-LFF (SEQ ID NO: 13815), VPTGQ (SEQ ID NO: 13632):SSLS-AA¹⁷-LFF (SEQ ID NO: 13815), SRVHH (SEQ ID NO: 13592):SSLS-AA¹⁷-LFF (SEQ ID NO: 13815), TQVQL (SEQ ID NO: 13603):SSLS-AA¹⁷-LFF (SEQ ID NO: 13815), APTEL (SEQ ID NO: 13578):NAIS-AA¹⁷-LYF (SEQ ID NO: 13805), APTKM (SEQ ID NO: 13580):NAIS-AA¹⁷-LYF (SEQ ID NO: 13805), APTKL (SEQ ID NO: 13579):NAIS-AA¹⁷-LYF (SEQ ID NO: 13805), APTRL (SEQ ID NO: 13583):NAIS-AA¹⁷-LYF (SEQ ID NO: 13805), APTKT (SEQ ID NO: 13581):NAIS-AA¹⁷-LYF (SEQ ID NO: 13805), APTAL (SEQ ID NO: 13576):NAIS-AA¹⁷-LYF (SEQ ID NO: 13805), APTDL (SEQ ID NO: 13577):NAIS-AA¹⁷-LYF (SEQ ID NO: 13805), VPTEL (SEQ ID NO: 13631):NAIS-AA¹⁷-LYF (SEQ ID NO: 13805), VPEKM (SEQ ID NO: 13616):NAIS-AA¹⁷-LYF (SEQ ID NO: 13805), VPTKL (SEQ ID NO: 13633):NAIS-AA¹⁷-LYF (SEQ ID NO: 13805), TPTKM (SEQ ID NO: 13598):NAIS-AA¹⁷-LYF (SEQ ID NO: 13805), VPARL (SEQ ID NO: 13611):NAIS-AA¹⁷-LYF (SEQ ID NO: 13805), VPTRL (SEQ ID NO: 13637):NAIS-AA¹⁷-LYF (SEQ ID NO: 13805), APVKT (SEQ ID NO: 13589):NAIS-AA¹⁷-LYF (SEQ ID NO: 13805), VPQAL (SEQ ID NO: 13620):NAIS-AA¹⁷-LYF (SEQ ID NO: 13805), VSQDL (SEQ ID NO: 13639):NAIS-AA¹⁷-LYF (SEQ ID NO: 13805), VPQDL (SEQ ID NO: 13621):NAIS-AA¹⁷-LYF (SEQ ID NO: 13805), VPTEE (SEQ ID NO: 13630):NAIS-AA¹⁷-LYF (SEQ ID NO: 13805), VPTGQ (SEQ ID NO: 13632):NAIS-AA¹⁷-LYF (SEQ ID NO: 13805), SRVHH (SEQ ID NO: 13592):NAIS-AA¹⁷-LYF (SEQ ID NO: 13805), TQVQL (SEQ ID NO: 13603):NAIS-AA¹⁷-LYF (SEQ ID NO: 13805), APTEL (SEQ ID NO: 13578):SATS-AA¹⁷-LYY (SEQ ID NO: 13809), APTKM (SEQ ID NO: 13580):SATS-AA¹⁷-LYY (SEQ ID NO: 13809), APTKL (SEQ ID NO: 13579):SATS-AA¹⁷-LYY (SEQ ID NO: 13809), APTQL (SEQ ID NO: 13582):SATS-AA¹⁷-LYY (SEQ ID NO: 13809), APTRL (SEQ ID NO: 13583):SATS-AA¹⁷-LYY (SEQ ID NO: 13809), APTKT (SEQ ID NO: 13581):SATS-AA¹⁷-LYY (SEQ ID NO: 13809), APTAL (SEQ ID NO: 13576):SATS-AA¹⁷-LYY (SEQ ID NO: 13809), APTDL (SEQ ID NO: 13577):SATS-AA¹⁷-LYY (SEQ ID NO: 13809), VPTEL (SEQ ID NO: 13631):SATS-AA¹⁷-LYY (SEQ ID NO: 13809), VPEKM (SEQ ID NO: 13616):SATS-AA¹⁷-LYY (SEQ ID NO: 13809), VPTKL (SEQ ID NO: 13633):SATS-AA¹⁷-LYY (SEQ ID NO: 13809), TPTKM (SEQ ID NO: 13598):SATS-AA¹⁷-LYY (SEQ ID NO: 13809), VPARL (SEQ ID NO: 13611):SATS-AA¹⁷-LYY (SEQ ID NO: 13809), VPTRL (SEQ ID NO: 13637):SATS-AA¹⁷-LYY (SEQ ID NO: 13809), APVKT (SEQ ID NO: 13589):SATS-AA¹⁷-LYY (SEQ ID NO: 13809), VPQAL (SEQ ID NO: 13620):SATS-AA¹⁷-LYY (SEQ ID NO: 13809), VSQDL (SEQ ID NO: 13639):SATS-AA¹⁷-LYY (SEQ ID NO: 13809), VPQDL (SEQ ID NO: 13621):SATS-AA¹⁷-LYY (SEQ ID NO: 13809), VPTEE (SEQ ID NO: 13630):SATS-AA¹⁷-LYY (SEQ ID NO: 13809), VPTGQ (SEQ ID NO: 13632):SATS-AA¹⁷-LYY (SEQ ID NO: 13809), SRVHH (SEQ ID NO: 13592):SATS-AA¹⁷-LYY (SEQ ID NO: 13809), TQVQL (SEQ ID NO: 13603):SATS-AA¹⁷-LYY (SEQ ID NO: 13809), VPTEL (SEQ ID NO: 13631):SPIS-AA¹⁷-LYK (SEQ ID NO: 13814), VPTKM (SEQ ID NO: 13634):SPIS-AA¹⁷-LYK (SEQ ID NO: 13814), VPTKL (SEQ ID NO: 13633):SPIS-AA¹⁷-LYK (SEQ ID NO: 13814), VPTQL (SEQ ID NO: 13636):SPIS-AA¹⁷-LYK (SEQ ID NO: 13814), VPTRL (SEQ ID NO: 13637):SPIS-AA¹⁷-LYK (SEQ ID NO: 13814), VPTKT (SEQ ID NO: 13635):SPIS-AA¹⁷-LYK (SEQ ID NO: 13814), VPTAL (SEQ ID NO: 13628):SPIS-AA¹⁷-LYK (SEQ ID NO: 13814), VPTDL (SEQ ID NO: 13629):SPIS-AA¹⁷-LYK (SEQ ID NO: 13814), VPEKM (SEQ ID NO: 13616):SPIS-AA¹⁷-LYK (SEQ ID NO: 13814), APTKL (SEQ ID NO: 13579):SPIS-AA¹⁷-LYK (SEQ ID NO: 13814), APTQL (SEQ ID NO: 13582):SPIS-AA¹⁷-LYK (SEQ ID NO: 13814), TPTKM (SEQ ID NO: 13598):SPIS-AA¹⁷-LYK (SEQ ID NO: 13814), VPARL (SEQ ID NO: 13611):SPIS-AA¹⁷-LYK (SEQ ID NO: 13814), APVKT (SEQ ID NO: 13589):SPIS-AA¹⁷-LYK (SEQ ID NO: 13814), VPQAL (SEQ ID NO: 13620):SPIS-AA¹⁷-LYK (SEQ ID NO: 13814), VSQDL (SEQ ID NO: 13639):SPIS-AA¹⁷-LYK (SEQ ID NO: 13814), VPQDL (SEQ ID NO: 13621):SPIS-AA¹⁷-LYK (SEQ ID NO: 13814), SRVHH (SEQ ID NO: 13592):SPIS-AA¹⁷-LYK (SEQ ID NO: 13814), TQVQL (SEQ ID NO: 13603):SPIS-AA¹⁷-LYK (SEQ ID NO: 13814), VPTEL (SEQ ID NO: 13631):EPIS-AA¹⁷-LYL (SEQ ID NO: 13801), VPTKM (SEQ ID NO: 13634):EPIS-AA¹⁷-LYL (SEQ ID NO: 13801), VPTKL (SEQ ID NO: 13633):EPIS-AA¹⁷-LYL (SEQ ID NO: 13801), VPTQL (SEQ ID NO: 13636):EPIS-AA¹⁷-LYL (SEQ ID NO: 13801), VPTRL (SEQ ID NO: 13637):EPIS-AA¹⁷-LYL (SEQ ID NO: 13801), VPTKT (SEQ ID NO: 13635):EPIS-AA¹⁷-LYL (SEQ ID NO: 13801), VPTAL (SEQ ID NO: 13628):EPIS-AA¹⁷-LYL (SEQ ID NO: 13801), VPTDL (SEQ ID NO: 13629):EPIS-AA¹⁷-LYL (SEQ ID NO: 13801), VPEKM (SEQ ID NO: 13616):EPIS-AA¹⁷-LYL (SEQ ID NO: 13801), APTKL (SEQ ID NO: 13579):EPIS-AA¹⁷-LYL (SEQ ID NO: 13801), APTQL (SEQ ID NO: 13582):EPIS-AA¹⁷-LYL (SEQ ID NO: 13801), TPTKM (SEQ ID NO: 13598):EPIS-AA¹⁷-LYL (SEQ ID NO: 13801), VPARL (SEQ ID NO: 13611):EPIS-AA¹⁷-LYL (SEQ ID NO: 13801), APVKT (SEQ ID NO: 13589):EPIS-AA¹⁷-LYL (SEQ ID NO: 13801), VPQAL (SEQ ID NO: 13620):EPIS-AA¹⁷-LYL (SEQ ID NO: 13801), VSQDL (SEQ ID NO: 13639):EPIS-AA¹⁷-LYL (SEQ ID NO: 13801), VPQDL (SEQ ID NO: 13621):EPIS-AA¹⁷-LYL (SEQ ID NO: 13801), SRVHH (SEQ ID NO: 13592):EPIS-AA¹⁷-LYL (SEQ ID NO: 13801), TQVQL (SEQ ID NO: 13603):EPIS-AA¹⁷-LYL (SEQ ID NO: 13801), TPTEL (SEQ ID NO: 13596):SPIN-AA¹⁷-LYF (SEQ ID NO: 13811), TPTKM (SEQ ID NO: 13598):SPIN-AA¹⁷-LYF (SEQ ID NO: 13811), TPTKL (SEQ ID NO: 13597):SPIN-AA¹⁷-LYF (SEQ ID NO: 13811), TPTQL (SEQ ID NO: 13600):SPIN-AA¹⁷-LYF (SEQ ID NO: 13811), TPTRL (SEQ ID NO: 13601):SPIN-AA¹⁷-LYF (SEQ ID NO: 13811), TPTKT (SEQ ID NO: 13599):SPIN-AA¹⁷-LYF (SEQ ID NO: 13811), TPTAL (SEQ ID NO: 13594):SPIN-AA¹⁷-LYF (SEQ ID NO: 13811), TPTDL (SEQ ID NO: 13595):SPIN-AA¹⁷-LYF (SEQ ID NO: 13811), VPTEL (SEQ ID NO: 13631):SPIN-AA¹⁷-LYF (SEQ ID NO: 13811), VPEKM (SEQ ID NO: 13616):SPIN-AA¹⁷-LYF (SEQ ID NO: 13811), APTKL (SEQ ID NO: 13579):SPIN-AA¹⁷-LYF (SEQ ID NO: 13811), APTQL (SEQ ID NO: 13582):SPIN-AA¹⁷-LYF (SEQ ID NO: 13811), VPTKL (SEQ ID NO: 13633):SPIN-AA¹⁷-LYF (SEQ ID NO: 13811), VPARL (SEQ ID NO: 13611):SPIN-AA¹⁷-LYF (SEQ ID NO: 13811), VPTRL (SEQ ID NO: 13637):SPIN-AA¹⁷-LYF (SEQ ID NO: 13811), APVKT (SEQ ID NO: 13589):SPIN-AA¹⁷-LYF (SEQ ID NO: 13811), VPQAL (SEQ ID NO: 13620):SPIN-AA¹⁷-LYF (SEQ ID NO: 13811), VSQDL (SEQ ID NO: 13639):SPIN-AA¹⁷-LYF (SEQ ID NO: 13811), VPQDL (SEQ ID NO: 13621):SPIN-AA¹⁷-LYF (SEQ ID NO: 13811), VPTEE (SEQ ID NO: 13630):SPIN-AA¹⁷-LYF (SEQ ID NO: 13811), VPTGQ (SEQ ID NO: 13632):SPIN-AA¹⁷-LYF (SEQ ID NO: 13811), SRVHH (SEQ ID NO: 13592):SPIN-AA¹⁷-LYF (SEQ ID NO: 13811), TQVQL (SEQ ID NO: 13603):SPIN-AA¹⁷-LYF (SEQ ID NO: 13811), VPAEL (SEQ ID NO: 13606):SPIS-AA¹⁷-LYI (SEQ ID NO: 13813), VPAKM (SEQ ID NO: 13608):SPIS-AA¹⁷-LYI (SEQ ID NO: 13813), VPAKL (SEQ ID NO: 13607):SPIS-AA¹⁷-LYI (SEQ ID NO: 13813), VPAQL (SEQ ID NO: 13610):SPIS-AA¹⁷-LYI (SEQ ID NO: 13813), VPARL (SEQ ID NO: 13611):SPIS-AA¹⁷-LYI (SEQ ID NO: 13813), VPAKT (SEQ ID NO: 13609):SPIS-AA¹⁷-LYI (SEQ ID NO: 13813), VPAAL (SEQ ID NO: 13604):SPIS-AA¹⁷-LYI (SEQ ID NO: 13813), VPADL (SEQ ID NO: 13605):SPIS-AA¹⁷-LYI (SEQ ID NO: 13813), VPTEL (SEQ ID NO: 13631):SPIS-AA¹⁷-LYI (SEQ ID NO: 13813), VPEKM (SEQ ID NO: 13616):SPIS-AA¹⁷-LYI (SEQ ID NO: 13813), APTKL (SEQ ID NO: 13579):SPIS-AA¹⁷-LYI (SEQ ID NO: 13813), APTQL (SEQ ID NO: 13582):SPIS-AA¹⁷-LYI (SEQ ID NO: 13813), VPTKL (SEQ ID NO: 13633):SPIS-AA¹⁷-LYI (SEQ ID NO: 13813), TPTKM (SEQ ID NO: 13598):SPIS-AA¹⁷-LYI (SEQ ID NO: 13813), VPTRL (SEQ ID NO: 13637):SPIS-AA¹⁷-LYI (SEQ ID NO: 13813), APVKT (SEQ ID NO: 13589):SPIS-AA¹⁷-LYI (SEQ ID NO: 13813), VPQAL (SEQ ID NO: 13620):SPIS-AA¹⁷-LYI (SEQ ID NO: 13813), VSQDL (SEQ ID NO: 13639):SPIS-AA¹⁷-LYI (SEQ ID NO: 13813), VPQDL (SEQ ID NO: 13621):SPIS-AA¹⁷-LYI (SEQ ID NO: 13813), VPTEE (SEQ ID NO: 13630):SPIS-AA¹⁷-LYI (SEQ ID NO: 13813), VPTGQ (SEQ ID NO: 13632):SPIS-AA¹⁷-LYI (SEQ ID NO: 13813), SRVHH (SEQ ID NO: 13592):SPIS-AA¹⁷-LYI (SEQ ID NO: 13813), TQVQL (SEQ ID NO: 13603):SPIS-AA¹⁷-LYI (SEQ ID NO: 13813), VPTEL (SEQ ID NO: 13631):SPIS-AA¹⁷-LFI (SEQ ID NO: 13812), VPTKM (SEQ ID NO: 13634):SPIS-AA¹⁷-LFI (SEQ ID NO: 13812), VPTKL (SEQ ID NO: 13633):SPIS-AA¹⁷-LFI (SEQ ID NO: 13812), VPTQL (SEQ ID NO: 13636):SPIS-AA¹⁷-LFI (SEQ ID NO: 13812), VPTRL (SEQ ID NO: 13637):SPIS-AA¹⁷-LFI (SEQ ID NO: 13812), VPTKT (SEQ ID NO: 13635):SPIS-AA¹⁷-LFI (SEQ ID NO: 13812), VPTAL (SEQ ID NO: 13628):SPIS-AA¹⁷-LFI (SEQ ID NO: 13812), VPTDL (SEQ ID NO: 13629):SPIS-AA¹⁷-LFI (SEQ ID NO: 13812), VPEKM (SEQ ID NO: 13616):SPIS-AA¹⁷-LFI (SEQ ID NO: 13812), APTKL (SEQ ID NO: 13579):SPIS-AA¹⁷-LFI (SEQ ID NO: 13812), APTQL (SEQ ID NO: 13582):SPIS-AA¹⁷-LFI (SEQ ID NO: 13812), TPTKM (SEQ ID NO: 13598):SPIS-AA¹⁷-LFI (SEQ ID NO: 13812), VPARL (SEQ ID NO: 13611):SPIS-AA¹⁷-LFI (SEQ ID NO: 13812), APVKT (SEQ ID NO: 13589):SPIS-AA¹⁷-LFI (SEQ ID NO: 13812), VPQAL (SEQ ID NO: 13620):SPIS-AA¹⁷-LFI (SEQ ID NO: 13812), VSQDL (SEQ ID NO: 13639):SPIS-AA¹⁷-LFI (SEQ ID NO: 13812), VPQDL (SEQ ID NO: 13621):SPIS-AA¹⁷-LFI (SEQ ID NO: 13812), SRVHH (SEQ ID NO: 13592):SPIS-AA¹⁷-LFI (SEQ ID NO: 13812), TQVQL (SEQ ID NO: 13603):SPIS-AA¹⁷-LFI (SEQ ID NO: 13812), APVEL (SEQ ID NO: 13586):KPLS-AA¹⁷-LYV (SEQ ID NO: 13804), APVKM (SEQ ID NO: 13588):KPLS-AA¹⁷-LYV (SEQ ID NO: 13804), APVKL (SEQ ID NO: 13587):KPLS-AA¹⁷-LYV (SEQ ID NO: 13804), APVQL (SEQ ID NO: 13590):KPLS-AA¹⁷-LYV (SEQ ID NO: 13804), APVRL (SEQ ID NO: 13591):KPLS-AA¹⁷-LYV (SEQ ID NO: 13804), APVAL (SEQ ID NO: 13584):KPLS-AA¹⁷-LYV (SEQ ID NO: 13804), APVDL (SEQ ID NO: 13585):KPLS-AA¹⁷-LYV (SEQ ID NO: 13804), VPTEL (SEQ ID NO: 13631):KPLS-AA¹⁷-LYV (SEQ ID NO: 13804), VPEKM (SEQ ID NO: 13616):KPLS-AA¹⁷-LYV (SEQ ID NO: 13804), APTKL (SEQ ID NO: 13579):KPLS-AA¹⁷-LYV (SEQ ID NO: 13804), APTQL (SEQ ID NO: 13582):KPLS-AA¹⁷-LYV (SEQ ID NO: 13804), VPTKL (SEQ ID NO: 13633):KPLS-AA¹⁷-LYV (SEQ ID NO: 13804), TPTKM (SEQ ID NO: 13598):KPLS-AA¹⁷-LYV (SEQ ID NO: 13804), VPARL (SEQ ID NO: 13611):KPLS-AA¹⁷-LYV (SEQ ID NO: 13804), VPTRL (SEQ ID NO: 13637):KPLS-AA¹⁷-LYV (SEQ ID NO: 13804), VPQAL (SEQ ID NO: 13620):KPLS-AA¹⁷-LYV (SEQ ID NO: 13804), VSQDL (SEQ ID NO: 13639):KPLS-AA¹⁷-LYV (SEQ ID NO: 13804), VPQDL (SEQ ID NO: 13621):KPLS-AA¹⁷-LYV (SEQ ID NO: 13804), VPTEE (SEQ ID NO: 13630):KPLS-AA¹⁷-LYV (SEQ ID NO: 13804), VPTGQ (SEQ ID NO: 13632):KPLS-AA¹⁷-LYV (SEQ ID NO: 13804), SRVHH (SEQ ID NO: 13592):KPLS-AA¹⁷-LYV (SEQ ID NO: 13804), TQVQL (SEQ ID NO: 13603):KPLS-AA¹⁷-LYV (SEQ ID NO: 13804), VPQEL (SEQ ID NO: 13622):EPLP-AA¹⁷-VYY (SEQ ID NO: 13802), VPQKM (SEQ ID NO: 13624):EPLP-AA¹⁷-VYY (SEQ ID NO: 13802), VPQKL (SEQ ID NO: 13623):EPLP-AA¹⁷-VYY (SEQ ID NO: 13802), VPQQL (SEQ ID NO: 13626):EPLP-AA¹⁷-VYY (SEQ ID NO: 13802), VPQRL (SEQ ID NO: 13627):EPLP-AA¹⁷-VYY (SEQ ID NO: 13802), VPQKT (SEQ ID NO: 13625):EPLP-AA¹⁷-VYY (SEQ ID NO: 13802), VPQDL (SEQ ID NO: 13621):EPLP-AA¹⁷-VYY (SEQ ID NO: 13802), VPTEL (SEQ ID NO: 13631):EPLP-AA¹⁷-VYY (SEQ ID NO: 13802), VPEKM (SEQ ID NO: 13616):EPLP-AA¹⁷-VYY (SEQ ID NO: 13802), APTKL (SEQ ID NO: 13579):EPLP-AA¹⁷-VYY (SEQ ID NO: 13802), APTQL (SEQ ID NO: 13582):EPLP-AA¹⁷-VYY (SEQ ID NO: 13802), VPTKL (SEQ ID NO: 13633):EPLP-AA¹⁷-VYY (SEQ ID NO: 13802), TPTKM (SEQ ID NO: 13598):EPLP-AA¹⁷-VYY (SEQ ID NO: 13802), VPARL (SEQ ID NO: 13611):EPLP-AA¹⁷-VYY (SEQ ID NO: 13802), VPTRL (SEQ ID NO: 13637):EPLP-AA¹⁷-VYY (SEQ ID NO: 13802), APVKT (SEQ ID NO: 13589):EPLP-AA¹⁷-VYY (SEQ ID NO: 13802), VSQDL (SEQ ID NO: 13639):EPLP-AA¹⁷-VYY (SEQ ID NO: 13802), VPTEE (SEQ ID NO: 13630):EPLP-AA¹⁷-VYY (SEQ ID NO: 13802), VPTGQ (SEQ ID NO: 13632):EPLP-AA¹⁷-VYY (SEQ ID NO: 13802), SRVHH (SEQ ID NO: 13592):EPLP-AA¹⁷-VYY (SEQ ID NO: 13802), TQVQL (SEQ ID NO: 13603):EPLP-AA¹⁷-VYY (SEQ ID NO: 13802), VSQEL (SEQ ID NO: 13640):EPLT-AA¹⁷-LYY (SEQ ID NO: 13803), VSQKM (SEQ ID NO: 13642):EPLT-AA¹⁷-LYY (SEQ ID NO: 13803), VSQKL (SEQ ID NO: 13641):EPLT-AA¹⁷-LYY (SEQ ID NO: 13803), VSQQL (SEQ ID NO: 13644):EPLT-AA¹⁷-LYY (SEQ ID NO: 13803), VSQRL (SEQ ID NO: 13645):EPLT-AA¹⁷-LYY (SEQ ID NO: 13803), VSQKT (SEQ ID NO: 13643):EPLT-AA¹⁷-LYY (SEQ ID NO: 13803), VSQAL (SEQ ID NO: 13638):EPLT-AA¹⁷-LYY (SEQ ID NO: 13803), VSQDL (SEQ ID NO: 13639):EPLT-AA¹⁷-LYY (SEQ ID NO: 13803), VPTEL (SEQ ID NO: 13631):EPLT-AA¹⁷-LYY (SEQ ID NO: 13803), VPEKM (SEQ ID NO: 13616):EPLT-AA¹⁷-LYY (SEQ ID NO: 13803), APTKL (SEQ ID NO: 13579):EPLT-AA¹⁷-LYY (SEQ ID NO: 13803), APTQL (SEQ ID NO: 13582):EPLT-AA¹⁷-LYY (SEQ ID NO: 13803), VPTKL (SEQ ID NO: 13633):EPLT-AA¹⁷-LYY (SEQ ID NO: 13803), TPTKM (SEQ ID NO: 13598):EPLT-AA¹⁷-LYY (SEQ ID NO: 13803), VPARL (SEQ ID NO: 13611):EPLT-AA¹⁷-LYY (SEQ ID NO: 13803), VPTRL (SEQ ID NO: 13637):EPLT-AA¹⁷-LYY (SEQ ID NO: 13803), APVKT (SEQ ID NO: 13589):EPLT-AA¹⁷-LYY (SEQ ID NO: 13803), VPQAL (SEQ ID NO: 13620):EPLT-AA¹⁷-LYY (SEQ ID NO: 13803), VPTEE (SEQ ID NO: 13630):EPLT-AA¹⁷-LYY (SEQ ID NO: 13803), VPTGQ (SEQ ID NO: 13632):EPLT-AA¹⁷-LYY (SEQ ID NO: 13803), SRVHH (SEQ ID NO: 13592):EPLT-AA¹⁷-LYY (SEQ ID NO: 13803), TQVQL (SEQ ID NO: 13603):EPLT-AA¹⁷-LYY (SEQ ID NO: 13803), VPQEL (SEQ ID NO: 13622):EPLT-AA¹⁷-LYY (SEQ ID NO: 13803), VPQKM (SEQ ID NO: 13624):EPLT-AA¹⁷-LYY (SEQ ID NO: 13803), VPQKL (SEQ ID NO: 13623):EPLT-AA¹⁷-LYY (SEQ ID NO: 13803), VPQQL (SEQ ID NO: 13626):EPLT-AA¹⁷-LYY (SEQ ID NO: 13803), VPQRL (SEQ ID NO: 13627):EPLT-AA¹⁷-LYY (SEQ ID NO: 13803), VPQKT (SEQ ID NO: 13625):EPLT-AA¹⁷-LYY (SEQ ID NO: 13803), VPQDL (SEQ ID NO: 13621):EPLT-AA¹⁷-LYY (SEQ ID NO: 13803), VPTGQ (SEQ ID NO: 13632):SNIT-AA¹⁷-QIM (SEQ ID NO: 13810), VPEKM (SEQ ID NO: 13616):SNIT-AA¹⁷-QIM (SEQ ID NO: 13810), APTKL (SEQ ID NO: 13579):SNIT-AA¹⁷-QIM (SEQ ID NO: 13810), APTQL (SEQ ID NO: 13582):SNIT-AA¹⁷-QIM (SEQ ID NO: 13810), TPTKM (SEQ ID NO: 13598):SNIT-AA¹⁷-QIM (SEQ ID NO: 13810), VPARL (SEQ ID NO: 13611):SNIT-AA¹⁷-QIM (SEQ ID NO: 13810), APVKT (SEQ ID NO: 13589):SNIT-AA¹⁷-QIM (SEQ ID NO: 13810), VPQAL (SEQ ID NO: 13620):SNIT-AA¹⁷-QIM (SEQ ID NO: 13810), VSQDL (SEQ ID NO: 13639):SNIT-AA¹⁷-QIM (SEQ ID NO: 13810), VPQDL (SEQ ID NO: 13621):SNIT-AA¹⁷-QIM (SEQ ID NO: 13810), SRVHH (SEQ ID NO: 13592):SNIT-AA¹⁷-QIM (SEQ ID NO: 13810), TQVQL (SEQ ID NO: 13603):SNIT-AA¹⁷-QIM (SEQ ID NO: 13810), SRVQL (SEQ ID NO: 13593):RSVK-AA¹⁷-AKV (SEQ ID NO: 13807), VPTEL (SEQ ID NO: 13631):RSVK-AA¹⁷-AKV (SEQ ID NO: 13807), VPEKM (SEQ ID NO: 13616):RSVK-AA¹⁷-AKV (SEQ ID NO: 13807), APTKL (SEQ ID NO: 13579):RSVK-AA¹⁷-AKV (SEQ ID NO: 13807), APTQL (SEQ ID NO: 13582):RSVK-AA¹⁷-AKV (SEQ ID NO: 13807), VPTKL (SEQ ID NO: 13633):RSVK-AA¹⁷-AKV (SEQ ID NO: 13807), TPTKM (SEQ ID NO: 13598):RSVK-AA¹⁷-AKV (SEQ ID NO: 13807), VPARL (SEQ ID NO: 13611):RSVK-AA¹⁷-AKV (SEQ ID NO: 13807), VPTRL (SEQ ID NO: 13637):RSVK-AA¹⁷-AKV (SEQ ID NO: 13807), APVKT (SEQ ID NO: 13589):RSVK-AA¹⁷-AKV (SEQ ID NO: 13807), VPQAL (SEQ ID NO: 13620):RSVK-AA¹⁷-AKV (SEQ ID NO: 13807), VSQDL (SEQ ID NO: 13639):RSVK-AA¹⁷-AKV (SEQ ID NO: 13807), VPQDL (SEQ ID NO: 13621):RSVK-AA¹⁷-AKV (SEQ ID NO: 13807), VPTEE (SEQ ID NO: 13630):RSVK-AA¹⁷-AKV (SEQ ID NO: 13807), VPTGQ (SEQ ID NO: 13632):RSVK-AA¹⁷-AKV (SEQ ID NO: 13807), TQVQL (SEQ ID NO: 13603):RSVK-AA¹⁷-AKV (SEQ ID NO: 13807), TQVHH (SEQ ID NO: 13602):RPVQ-AA¹⁷-RKI (SEQ ID NO: 13806), VPTEL (SEQ ID NO: 13631):RPVQ-AA¹⁷-RKI (SEQ ID NO: 13806), VPEKM (SEQ ID NO: 13616):RPVQ-AA¹⁷-RKI (SEQ ID NO: 13806), APTKL (SEQ ID NO: 13579):RPVQ-AA¹⁷-RKI (SEQ ID NO: 13806), APTQL (SEQ ID NO: 13582):RPVQ-AA¹⁷-RKI (SEQ ID NO: 13806), VPTKL (SEQ ID NO: 13633):RPVQ-AA¹⁷-RKI (SEQ ID NO: 13806), TPTKM (SEQ ID NO: 13598):RPVQ-AA¹⁷-RKI (SEQ ID NO: 13806), VPARL (SEQ ID NO: 13611):RPVQ-AA¹⁷-RKI (SEQ ID NO: 13806), VPTRL (SEQ ID NO: 13637):RPVQ-AA¹⁷-RKI (SEQ ID NO: 13806), APVKT (SEQ ID NO: 13589):RPVQ-AA¹⁷-RKI (SEQ ID NO: 13806), VPQAL (SEQ ID NO: 13620):RPVQ-AA¹⁷-RKI (SEQ ID NO: 13806), VSQDL (SEQ ID NO: 13639):RPVQ-AA¹⁷-RKI (SEQ ID NO: 13806), VPQDL (SEQ ID NO: 13621):RPVQ-AA¹⁷-RKI (SEQ ID NO: 13806), VPTEE (SEQ ID NO: 13630):RPVQ-AA¹⁷-RKI (SEQ ID NO: 13806), VPTGQ (SEQ ID NO: 13632):RPVQ-AA¹⁷-RKI (SEQ ID NO: 13806) and SRVHH (SEQ ID NO: 13592):RPVQ-AA¹⁷-RKI (SEQ ID NO: 13806); and wherein AA¹⁷ is selected from the group consisting of G, A, V, L, I, P, F, M, W, T and S (in particular is selected from the group consisting of M, I, L, V and T).

[0307] In particular, in certain embodiments, the pair PEP12:PEP7 is selected from the group consisting of GIPEPXX (SEQ ID NO: 13650):SAIS-AA¹⁷-LYL (SEQ ID NO: 13808), HVTKPTX (SEQ ID NO: 13653):SAIS-AA¹⁷-LYL (SEQ ID NO: 13808), YVPKPXX (SEQ ID NO: 13664):SAIS-AA¹⁷-LYL (SEQ ID NO: 13808), TVPKPXX (SEQ ID NO: 13663):SAIS-AA¹⁷-LYL (SEQ ID NO: 13808), AVPKAXX (SEQ ID NO: 13649):SAIS-AA¹⁷-LYL (SEQ ID NO: 13808), KVGKAXX (SEQ ID NO: 13656):SAIS-AA¹⁷-LYL (SEQ ID NO: 13808), KASKAXX (SEQ ID NO: 13654):SAIS-AA¹⁷-LYL (SEQ ID NO: 13808), GSAGPXX (SEQ ID NO: 13651):SAIS-AA¹⁷-LYL (SEQ ID NO: 13808), AAPASXX (SEQ ID NO: 13646):SAIS-AA¹⁷-LYL (SEQ ID NO: 13808), STPPTXX (SEQ ID NO: 13662):SAIS-AA¹⁷-LYL (SEQ ID NO: 13808), HVPKPXX (SEQ ID NO: 13652):SAIS-AA¹⁷-LYL (SEQ ID NO: 13808), RVPSTXX (SEQ ID NO: 13659):SAIS-AA¹⁷-LYL (SEQ ID NO: 13808), ASAAPXX (SEQ ID NO: 13647):SAIS-AA¹⁷-LYL (SEQ ID NO: 13808), ASASPXX (SEQ ID NO: 13648):SAIS-AA¹⁷-LYL (SEQ ID NO: 13808), SSVKXQP (SEQ ID NO: 13661):SAIS-AA¹⁷-LYL (SEQ ID NO: 13808), RNVQXRP (SEQ ID NO: 13658):SAIS-AA¹⁷-LYL (SEQ ID NO: 13808), KIPKAXX (SEQ ID NO: 13655):SSLS-AA¹⁷-LFF (SEQ ID NO: 13815), SIPKAXX (SEQ ID NO: 13660):SSLS-AA¹⁷-LFF (SEQ ID NO: 13815), HVTKPTX (SEQ ID NO: 13653):SSLS-AA¹⁷-LFF (SEQ ID NO: 13815), YVPKPXX (SEQ ID NO: 13664):SSLS-AA¹⁷-LFF (SEQ ID NO: 13815), TVPKPXX (SEQ ID NO: 13663):SSLS-AA¹⁷-LFF (SEQ ID NO: 13815), AVPKAXX (SEQ ID NO: 13649):SSLS-AA¹⁷-LFF (SEQ ID NO: 13815), KVGKAXX (SEQ ID NO: 13656):SSLS-AA¹⁷-LFF (SEQ ID NO: 13815), KASKAXX (SEQ ID NO: 13654):SSLS-AA¹⁷-LFF (SEQ ID NO: 13815), GSAGPXX (SEQ ID NO: 13651):SSLS-AA¹⁷-LFF (SEQ ID NO: 13815), AAPASXX (SEQ ID NO: 13646):SSLS-AA¹⁷-LFF (SEQ ID NO: 13815), STPPTXX (SEQ ID NO: 13662):SSLS-AA¹⁷-LFF (SEQ ID NO: 13815), HVPKPXX (SEQ ID NO: 13652):SSLS-AA¹⁷-LFF (SEQ ID NO: 13815), RVPSTXX (SEQ ID NO: 13659):SSLS-AA¹⁷-LFF (SEQ ID NO: 13815), ASAAPXX (SEQ ID NO: 13647):SSLS-AA¹⁷-LFF (SEQ ID NO: 13815), ASASPXX (SEQ ID NO: 13648):SSLS-AA¹⁷-LFF (SEQ ID NO: 13815), NDEGLEX (SEQ ID NO: 13657):SSLS-AA¹⁷-LFF (SEQ ID NO: 13815), SSVKXQP (SEQ ID NO: 13661):SSLS-AA¹⁷-LFF (SEQ ID NO: 13815), RNVQXRP (SEQ ID NO: 13658):SSLS-AA¹⁷-LFF (SEQ ID NO: 13815), KIPKAXX (SEQ ID NO: 13655):NAIS-AA¹⁷-LYF (SEQ ID NO: 13805), GIPEPXX (SEQ ID NO: 13650):NAIS-AA¹⁷-LYF (SEQ ID NO: 13805), SIPKAXX (SEQ ID NO: 13660):NAIS-AA¹⁷-LYF (SEQ ID NO: 13805), AVPKAXX (SEQ ID NO: 13649):NAIS-AA¹⁷-LYF (SEQ ID NO: 13805), KVGKAXX (SEQ ID NO: 13656):NAIS-AA¹⁷-LYF (SEQ ID NO: 13805), KASKAXX (SEQ ID NO: 13654):NAIS-AA¹⁷-LYF (SEQ ID NO: 13805), GSAGPXX (SEQ ID NO: 13651):NAIS-AA¹⁷-LYF (SEQ ID NO: 13805), AAPASXX (SEQ ID NO: 13646):NAIS-AA¹⁷-LYF (SEQ ID NO: 13805), STPPTXX (SEQ ID NO: 13662):NAIS-AA¹⁷-LYF (SEQ ID NO: 13805), RVPSTXX (SEQ ID NO: 13659):NAIS-AA¹⁷-LYF (SEQ ID NO: 13805), ASAAPXX (SEQ ID NO: 13647):NAIS-AA¹⁷-LYF (SEQ ID NO: 13805), ASASPXX (SEQ ID NO: 13648):NAIS-AA¹⁷-LYF (SEQ ID NO: 13805), NDEGLEX (SEQ ID NO: 13657):NAIS-AA¹⁷-LYF (SEQ ID NO: 13805), SSVKXQP (SEQ ID NO: 13661):NAIS-AA¹⁷-LYF (SEQ ID NO: 13805), RNVQXRP (SEQ ID NO: 13658):NAIS-AA¹⁷-LYF (SEQ ID NO: 13805), KIPKAXX (SEQ ID NO: 13655):SATS-AA¹⁷-LYY (SEQ ID NO: 13809), GIPEPXX (SEQ ID NO: 13650):SATS-AA¹⁷-LYY (SEQ ID NO: 13809), SIPKAXX (SEQ ID NO: 13660):SATS-AA¹⁷-LYY (SEQ ID NO: 13809), HVTKPTX (SEQ ID NO: 13653):SATS-AA¹⁷-LYY (SEQ ID NO: 13809), YVPKPXX (SEQ ID NO: 13664):SATS-AA¹⁷-LYY (SEQ ID NO: 13809), TVPKPXX (SEQ ID NO: 13663):SATS-AA¹⁷-LYY (SEQ ID NO: 13809), KVGKAXX (SEQ ID NO: 13656):SATS-AA¹⁷-LYY (SEQ ID NO: 13809), KASKAXX (SEQ ID NO: 13654):SATS-AA¹⁷-LYY (SEQ ID NO: 13809), GSAGPXX (SEQ ID NO: 13651):SATS-AA¹⁷-LYY (SEQ ID NO: 13809), AAPASXX (SEQ ID NO: 13646):SATS-AA¹⁷-LYY (SEQ ID NO: 13809), STPPTXX (SEQ ID NO: 13662):SATS-AA¹⁷-LYY (SEQ ID NO: 13809), HVPKPXX (SEQ ID NO: 13652):SATS-AA¹⁷-LYY (SEQ ID NO: 13809), RVPSTXX (SEQ ID NO: 13659):SATS-AA¹⁷-LYY (SEQ ID NO: 13809), ASAAPXX (SEQ ID NO: 13647):SATS-AA¹⁷-LYY (SEQ ID NO: 13809), ASASPXX (SEQ ID NO: 13648):SATS-AA¹⁷-LYY (SEQ ID NO: 13809), NDEGLEX (SEQ ID NO: 13657):SATS-AA¹⁷-LYY (SEQ ID NO: 13809), SSVKXQP (SEQ ID NO: 13661):SATS-AA¹⁷-LYY (SEQ ID NO: 13809), RNVQXRP (SEQ ID NO: 13658):SATS-AA¹⁷-LYY (SEQ ID NO: 13809), KIPKAXX (SEQ ID NO: 13655):SPIS-AA¹⁷-LYK (SEQ ID NO: 13814), GIPEPXX (SEQ ID NO: 13650):SPIS-AA¹⁷-LYK (SEQ ID NO: 13814), SIPKAXX (SEQ ID NO: 13660):SPIS-AA¹⁷-LYK (SEQ ID NO: 13814), HVTKPTX (SEQ ID NO: 13653):SPIS-AA¹⁷-LYK (SEQ ID NO: 13814), YVPKPXX (SEQ ID NO: 13664):SPIS-AA¹⁷-LYK (SEQ ID NO: 13814), TVPKPXX (SEQ ID NO: 13663):SPIS-AA¹⁷-LYK (SEQ ID NO: 13814), AVPKAXX (SEQ ID NO: 13649):SPIS-AA¹⁷-LYK (SEQ ID NO: 13814), KASKAXX (SEQ ID NO: 13654):SPIS-AA¹⁷-LYK (SEQ ID NO: 13814), GSAGPXX (SEQ ID NO: 13651):SPIS-AA¹⁷-LYK (SEQ ID NO: 13814), AAPASXX (SEQ ID NO: 13646):SPIS-AA¹⁷-LYK (SEQ ID NO: 13814), STPPTXX (SEQ ID NO: 13662):SPIS-AA¹⁷-LYK (SEQ ID NO: 13814), HVPKPXX (SEQ ID NO: 13652):SPIS-AA¹⁷-LYK (SEQ ID NO: 13814), RVPSTXX (SEQ ID NO: 13659):SPIS-AA¹⁷-LYK (SEQ ID NO: 13814), ASAAPXX (SEQ ID NO: 13647):SPIS-AA¹⁷-LYK (SEQ ID NO: 13814), ASASPXX (SEQ ID NO: 13648):SPIS-AA¹⁷-LYK (SEQ ID NO: 13814), SSVKXQP (SEQ ID NO: 13661):SPIS-AA¹⁷-LYK (SEQ ID NO: 13814), RNVQXRP (SEQ ID NO: 13658):SPIS-AA¹⁷-LYK (SEQ ID NO: 13814), KIPKAXX (SEQ ID NO: 13655):EPIS-AA¹⁷-LYL (SEQ ID NO: 13801), GIPEPXX (SEQ ID NO: 13650):EPIS-AA¹⁷-LYL (SEQ ID NO: 13801), SIPKAXX (SEQ ID NO: 13660):EPIS-AA¹⁷-LYL (SEQ ID NO: 13801), HVTKPTX (SEQ ID NO: 13653):EPIS-AA¹⁷-LYL (SEQ ID NO: 13801), YVPKPXX (SEQ ID NO: 13664):EPIS-AA¹⁷-LYL (SEQ ID NO: 13801), TVPKPXX (SEQ ID NO: 13663):EPIS-AA¹⁷-LYL (SEQ ID NO: 13801), AVPKAXX (SEQ ID NO: 13649):EPIS-AA¹⁷-LYL (SEQ ID NO: 13801), KVGKAXX (SEQ ID NO: 13656):EPIS-AA¹⁷-LYL (SEQ ID NO: 13801), GSAGPXX (SEQ ID NO: 13651):EPIS-AA¹⁷-LYL (SEQ ID NO: 13801), AAPASXX (SEQ ID NO: 13646):EPIS-AA¹⁷-LYL (SEQ ID NO: 13801), STPPTXX (SEQ ID NO: 13662):EPIS-AA¹⁷-LYL (SEQ ID NO: 13801), HVPKPXX (SEQ ID NO: 13652):EPIS-AA¹⁷-LYL (SEQ ID NO: 13801), RVPSTXX (SEQ ID NO: 13659):EPIS-AA¹⁷-LYL (SEQ ID NO: 13801), ASAAPXX (SEQ ID NO: 13647):EPIS-AA¹⁷-LYL (SEQ ID NO: 13801), ASASPXX (SEQ ID NO: 13648):EPIS-AA¹⁷-LYL (SEQ ID NO: 13801), SSVKXQP (SEQ ID NO: 13661):EPIS-AA¹⁷-LYL (SEQ ID NO: 13801), RNVQXRP (SEQ ID NO: 13658):EPIS-AA¹⁷-LYL (SEQ ID NO: 13801), KIPKAXX (SEQ ID NO: 13655):SPIN-AA¹⁷-LYF (SEQ ID NO: 13811), GIPEPXX (SEQ ID NO: 13650):SPIN-AA¹⁷-LYF (SEQ ID NO: 13811), SIPKAXX (SEQ ID NO: 13660):SPIN-AA¹⁷-LYF (SEQ ID NO: 13811), HVTKPTX (SEQ ID NO: 13653):SPIN-AA¹⁷-LYF (SEQ ID NO: 13811), YVPKPXX (SEQ ID NO: 13664):SPIN-AA¹⁷-LYF (SEQ ID NO: 13811), TVPKPXX (SEQ ID NO: 13663):SPIN-AA¹⁷-LYF (SEQ ID NO: 13811), AVPKAXX (SEQ ID NO: 13649):SPIN-AA¹⁷-LYF (SEQ ID NO: 13811), KVGKAXX (SEQ ID NO: 13656):SPIN-AA¹⁷-LYF (SEQ ID NO: 13811), KASKAXX (SEQ ID NO: 13654):SPIN-AA¹⁷-LYF (SEQ ID NO: 13811), AAPASXX (SEQ ID NO: 13646):SPIN-AA¹⁷-LYF (SEQ ID NO: 13811), STPPTXX (SEQ ID NO: 13662):SPIN-AA¹⁷-LYF (SEQ ID NO: 13811), HVPKPXX (SEQ ID NO: 13652):SPIN-AA¹⁷-LYF (SEQ ID NO: 13811), RVPSTXX (SEQ ID NO: 13659):SPIN-AA¹⁷-LYF (SEQ ID NO: 13811), ASAAPXX (SEQ ID NO: 13647):SPIN-AA¹⁷-LYF (SEQ ID NO: 13811), ASASPXX (SEQ ID NO: 13648):SPIN-AA¹⁷-LYF (SEQ ID NO: 13811), NDEGLEX (SEQ ID NO: 13657):SPIN-AA¹⁷-LYF (SEQ ID NO: 13811), SSVKXQP (SEQ ID NO: 13661):SPIN-AA¹⁷-LYF (SEQ ID NO: 13811), RNVQXRP (SEQ ID NO: 13658):SPIN-AA¹⁷-LYF (SEQ ID NO: 13811), KIPKAXX (SEQ ID NO: 13655):SPIS-AA¹⁷-LYI (SEQ ID NO: 13813), GIPEPXX (SEQ ID NO: 13650):SPIS-AA¹⁷-LYI (SEQ ID NO: 13813), SIPKAXX (SEQ ID NO: 13660):SPIS-AA¹⁷-LYI (SEQ ID NO: 13813), HVTKPTX (SEQ ID NO: 13653):SPIS-AA¹⁷-LYI (SEQ ID NO: 13813), YVPKPXX (SEQ ID NO: 13664):SPIS-AA¹⁷-LYI (SEQ ID NO: 13813), TVPKPXX (SEQ ID NO: 13663):SPIS-AA¹⁷-LYI (SEQ ID NO: 13813), AVPKAXX (SEQ ID NO: 13649):SPIS-AA¹⁷-LYI (SEQ ID NO: 13813), KVGKAXX (SEQ ID NO: 13656):SPIS-AA¹⁷-LYI (SEQ ID NO: 13813), KASKAXX (SEQ ID NO: 13654):SPIS-AA¹⁷-LYI (SEQ ID NO: 13813), GSAGPXX (SEQ ID NO: 13651):SPIS-AA¹⁷-LYI (SEQ ID NO: 13813), STPPTXX (SEQ ID NO: 13662):SPIS-AA¹⁷-LYI (SEQ ID NO: 13813), HVPKPXX (SEQ ID NO: 13652):SPIS-AA¹⁷-LYI (SEQ ID NO: 13813), RVPSTXX (SEQ ID NO: 13659):SPIS-AA¹⁷-LYI (SEQ ID NO: 13813), ASAAPXX (SEQ ID NO: 13647):SPIS-AA¹⁷-LYI (SEQ ID NO: 13813), ASASPXX (SEQ ID NO: 13648):SPIS-AA¹⁷-LYI (SEQ ID NO: 13813), NDEGLEX (SEQ ID NO: 13657):SPIS-AA¹⁷-LYI (SEQ ID NO: 13813), SSVKXQP (SEQ ID NO: 13661):SPIS-AA¹⁷-LYI (SEQ ID NO: 13813), RNVQXRP (SEQ ID NO: 13658):SPIS-AA¹⁷-LYI (SEQ ID NO: 13813), KIPKAXX (SEQ ID NO: 13655):SPIS-AA¹⁷-LFI (SEQ ID NO: 13812), GIPEPXX (SEQ ID NO: 13650):SPIS-AA¹⁷-LFI (SEQ ID NO: 13812), SIPKAXX (SEQ ID NO: 13660):SPIS-AA¹⁷-LFI (SEQ ID NO: 13812), HVTKPTX (SEQ ID NO: 13653):SPIS-AA¹⁷-LFI (SEQ ID NO: 13812), YVPKPXX (SEQ ID NO: 13664):SPIS-AA¹⁷-LFI (SEQ ID NO: 13812), TVPKPXX (SEQ ID NO: 13663):SPIS-AA¹⁷-LFI (SEQ ID NO: 13812), AVPKAXX (SEQ ID NO: 13649):SPIS-AA¹⁷-LFI (SEQ ID NO: 13812), KVGKAXX (SEQ ID NO: 13656):SPIS-AA¹⁷-LFI (SEQ ID NO: 13812), KASKAXX (SEQ ID NO: 13654):SPIS-AA¹⁷-LFI (SEQ ID NO: 13812), GSAGPXX (SEQ ID NO: 13651):SPIS-AA¹⁷-LFI (SEQ ID NO: 13812), AAPASXX (SEQ ID NO: 13646):SPIS-AA¹⁷-LFI (SEQ ID NO: 13812), HVPKPXX (SEQ ID NO: 13652):SPIS-AA¹⁷-LFI (SEQ ID NO: 13812), RVPSTXX (SEQ ID NO: 13659):SPIS-AA¹⁷-LFI (SEQ ID NO: 13812), ASAAPXX (SEQ ID NO: 13647):SPIS-AA¹⁷-LFI (SEQ ID NO: 13812), ASASPXX (SEQ ID NO: 13648):SPIS-AA¹⁷-LFI (SEQ ID NO: 13812), SSVKXQP (SEQ ID NO: 13661):SPIS-AA¹⁷-LFI (SEQ ID NO: 13812), RNVQXRP (SEQ ID NO: 13658):SPIS-AA¹⁷-LFI (SEQ ID NO: 13812), KIPKAXX (SEQ ID NO: 13655):KPLS-AA¹⁷-LYV (SEQ ID NO: 13804), GIPEPXX (SEQ ID NO: 13650):KPLS-AA¹⁷-LYV (SEQ ID NO: 13804), SIPKAXX (SEQ ID NO: 13660):KPLS-AA¹⁷-LYV (SEQ ID NO: 13804), HVTKPTX (SEQ ID NO: 13653):KPLS-AA¹⁷-LYV (SEQ ID NO: 13804), YVPKPXX (SEQ ID NO: 13664):KPLS-AA¹⁷-LYV (SEQ ID NO: 13804), TVPKPXX (SEQ ID NO: 13663):KPLS-AA¹⁷-LYV (SEQ ID NO: 13804), AVPKAXX (SEQ ID NO: 13649):KPLS-AA¹⁷-LYV (SEQ ID NO: 13804), KVGKAXX (SEQ ID NO: 13656):KPLS-AA¹⁷-LYV (SEQ ID NO: 13804), KASKAXX (SEQ ID NO: 13654):KPLS-AA¹⁷-LYV (SEQ ID NO: 13804), GSAGPXX (SEQ ID NO: 13651):KPLS-AA¹⁷-LYV (SEQ ID NO: 13804), AAPASXX (SEQ ID NO: 13646):KPLS-AA¹⁷-LYV (SEQ ID NO: 13804), STPPTXX (SEQ ID NO: 13662):KPLS-AA¹⁷-LYV (SEQ ID NO: 13804), HVPKPXX (SEQ ID NO: 13652):KPLS-AA¹⁷-LYV (SEQ ID NO: 13804), ASAAPXX (SEQ ID NO: 13647):KPLS-AA¹⁷-LYV (SEQ ID NO: 13804), ASASPXX (SEQ ID NO: 13648):KPLS-AA¹⁷-LYV (SEQ ID NO: 13804), NDEGLEX (SEQ ID NO: 13657):KPLS-AA¹⁷-LYV (SEQ ID NO: 13804), SSVKXQP (SEQ ID NO: 13661):KPLS-AA¹⁷-LYV (SEQ ID NO: 13804), RNVQXRP (SEQ ID NO: 13658):KPLS-AA¹⁷-LYV (SEQ ID NO: 13804), KIPKAXX (SEQ ID NO: 13655):EPLP-AA¹⁷-VYY (SEQ ID NO: 13802), GIPEPXX (SEQ ID NO: 13650):EPLP-AA¹⁷-VYY (SEQ ID NO: 13802), SIPKAXX (SEQ ID NO: 13660):EPLP-AA¹⁷-VYY (SEQ ID NO: 13802), HVTKPTX (SEQ ID NO: 13653):EPLP-AA¹⁷-VYY (SEQ ID NO: 13802), YVPKPXX (SEQ ID NO: 13664):EPLP-AA¹⁷-VYY (SEQ ID NO: 13802), TVPKPXX (SEQ ID NO: 13663):EPLP-AA¹⁷-VYY (SEQ ID NO: 13802), AVPKAXX (SEQ ID NO: 13649):EPLP-AA¹⁷-VYY (SEQ ID NO: 13802), KVGKAXX (SEQ ID NO: 13656):EPLP-AA¹⁷-VYY (SEQ ID NO: 13802), KASKAXX (SEQ ID NO: 13654):EPLP-AA¹⁷-VYY (SEQ ID NO: 13802), GSAGPXX (SEQ ID NO: 13651):EPLP-AA¹⁷-VYY (SEQ ID NO: 13802), AAPASXX (SEQ ID NO: 13646):EPLP-AA¹⁷-VYY (SEQ ID NO: 13802), STPPTXX (SEQ ID NO: 13662):EPLP-AA¹⁷-VYY (SEQ ID NO: 13802), HVPKPXX (SEQ ID NO: 13652):EPLP-AA¹⁷-VYY (SEQ ID NO: 13802), RVPSTXX (SEQ ID NO: 13659):EPLP-AA¹⁷-VYY (SEQ ID NO: 13802), ASASPXX (SEQ ID NO: 13648):EPLP-AA¹⁷-VYY (SEQ ID NO: 13802), NDEGLEX (SEQ ID NO: 13657):EPLP-AA¹⁷-VYY (SEQ ID NO: 13802), SSVKXQP (SEQ ID NO: 13661):EPLP-AA¹⁷-VYY (SEQ ID NO: 13802), RNVQXRP (SEQ ID NO: 13658):EPLP-AA¹⁷-VYY (SEQ ID NO: 13802), KIPKAXX (SEQ ID NO: 13655):EPLT-AA¹⁷-LYY (SEQ ID NO: 13803), GIPEPXX (SEQ ID NO: 13650):EPLT-AA¹⁷-LYY (SEQ ID NO: 13803), SIPKAXX (SEQ ID NO: 13660):EPLT-AA¹⁷-LYY (SEQ ID NO: 13803), HVTKPTX (SEQ ID NO: 13653):EPLT-AA¹⁷-LYY (SEQ ID NO: 13803), YVPKPXX (SEQ ID NO: 13664):EPLT-AA¹⁷-LYY (SEQ ID NO: 13803), TVPKPXX (SEQ ID NO: 13663):EPLT-AA¹⁷-LYY (SEQ ID NO: 13803), AVPKAXX (SEQ ID NO: 13649):EPLT-AA¹⁷-LYY (SEQ ID NO: 13803), KVGKAXX (SEQ ID NO: 13656):EPLT-AA¹⁷-LYY (SEQ ID NO: 13803), KASKAXX (SEQ ID NO: 13654):EPLT-AA¹⁷-LYY (SEQ ID NO: 13803), GSAGPXX (SEQ ID NO: 13651):EPLT-AA¹⁷-LYY (SEQ ID NO: 13803), AAPASXX (SEQ ID NO: 13646):EPLT-AA¹⁷-LYY (SEQ ID NO: 13803), STPPTXX (SEQ ID NO: 13662):EPLT-AA¹⁷-LYY (SEQ ID NO: 13803), HVPKPXX (SEQ ID NO: 13652):EPLT-AA¹⁷-LYY (SEQ ID NO: 13803), RVPSTXX (SEQ ID NO: 13659):EPLT-AA¹⁷-LYY (SEQ ID NO: 13803), ASAAPXX (SEQ ID NO: 13647):EPLT-AA¹⁷-LYY (SEQ ID NO: 13803), ASASPXX (SEQ ID NO: 13648):EPLT-AA¹⁷-LYY (SEQ ID NO: 13803), NDEGLEX (SEQ ID NO: 13657):EPLT-AA¹⁷-LYY (SEQ ID NO: 13803), SSVKXQP (SEQ ID NO: 13661):EPLT-AA¹⁷-LYY (SEQ ID NO: 13803), RNVQXRP (SEQ ID NO: 13658):EPLT-AA¹⁷-LYY (SEQ ID NO: 13803), NDEGLEX (SEQ ID NO: 13657):SNIT-AA¹⁷-QIM (SEQ ID NO: 13810), GIPEPXX (SEQ ID NO: 13650):SNIT-AA¹⁷-QIM (SEQ ID NO: 13810), HVTKPTX (SEQ ID NO: 13653):SNIT-AA¹⁷-QIM (SEQ ID NO: 13810), YVPKPXX (SEQ ID NO: 13664):SNIT-AA¹⁷-QIM (SEQ ID NO: 13810), TVPKPXX (SEQ ID NO: 13663):SNIT-AA¹⁷-QIM (SEQ ID NO: 13810), AVPKAXX (SEQ ID NO: 13649):SNIT-AA¹⁷-QIM (SEQ ID NO: 13810), GSAGPXX (SEQ ID NO: 13651):SNIT-AA¹⁷-QIM (SEQ ID NO: 13810), AAPASXX (SEQ ID NO: 13646):SNIT-AA¹⁷-QIM (SEQ ID NO: 13810), HVPKPXX (SEQ ID NO: 13652):SNIT-AA¹⁷-QIM (SEQ ID NO: 13810), RVPSTXX (SEQ ID NO: 13659):SNIT-AA¹⁷-QIM (SEQ ID NO: 13810), ASAAPXX (SEQ ID NO: 13647):SNIT-AA¹⁷-QIM (SEQ ID NO: 13810), ASASPXX (SEQ ID NO: 13648):SNIT-AA¹⁷-QIM (SEQ ID NO: 13810), SSVKXQP (SEQ ID NO: 13661):SNIT-AA¹⁷-QIM (SEQ ID NO: 13810), RNVQXRP (SEQ ID NO: 13658):SNIT-AA¹⁷-QIM (SEQ ID NO: 13810), RNVQXRP (SEQ ID NO: 13658):RSVK-AA¹⁷-AKV (SEQ ID NO: 13807), KIPKAXX (SEQ ID NO: 13655):RSVK-AA¹⁷-AKV (SEQ ID NO: 13807), GIPEPXX (SEQ ID NO: 13650):RSVK-AA¹⁷-AKV (SEQ ID NO: 13807), SIPKAXX (SEQ ID NO: 13660):RSVK-AA¹⁷-AKV (SEQ ID NO: 13807), HVTKPTX (SEQ ID NO: 13653):RSVK-AA¹⁷-AKV (SEQ ID NO: 13807), YVPKPXX (SEQ ID NO: 13664):RSVK-AA¹⁷-AKV (SEQ ID NO: 13807), TVPKPXX (SEQ ID NO: 13663):RSVK-AA¹⁷-AKV (SEQ ID NO: 13807), AVPKAXX (SEQ ID NO: 13649):RSVK-AA¹⁷-AKV (SEQ ID NO: 13807), KVGKAXX (SEQ ID NO: 13656):RSVK-AA¹⁷-AKV (SEQ ID NO: 13807), KASKAXX (SEQ ID NO: 13654):RSVK-AA¹⁷-AKV (SEQ ID NO: 13807), GSAGPXX (SEQ ID NO: 13651):RSVK-AA¹⁷-AKV (SEQ ID NO: 13807), AAPASXX (SEQ ID NO: 13646):RSVK-AA¹⁷-AKV (SEQ ID NO: 13807), STPPTXX (SEQ ID NO: 13662):RSVK-AA¹⁷-AKV (SEQ ID NO: 13807), HVPKPXX (SEQ ID NO: 13652):RSVK-AA¹⁷-AKV (SEQ ID NO: 13807), RVPSTXX (SEQ ID NO: 13659):RSVK-AA¹⁷-AKV (SEQ ID NO: 13807), ASAAPXX (SEQ ID NO: 13647):RSVK-AA¹⁷-AKV (SEQ ID NO: 13807), ASASPXX (SEQ ID NO: 13648):RSVK-AA¹⁷-AKV (SEQ ID NO: 13807), NDEGLEX (SEQ ID NO: 13657):RSVK-AA¹⁷-AKV (SEQ ID NO: 13807), SSVKXQP (SEQ ID NO: 13661):RPVQ-AA¹⁷-RKI (SEQ ID NO: 13806), KIPKAXX (SEQ ID NO: 13655):RPVQ-AA¹⁷-RKI (SEQ ID NO: 13806), GIPEPXX (SEQ ID NO: 13650):RPVQ-AA¹⁷-RKI (SEQ ID NO: 13806), SIPKAXX (SEQ ID NO: 13660):RPVQ-AA¹⁷-RKI (SEQ ID NO: 13806), HVTKPTX (SEQ ID NO: 13653):RPVQ-AA¹⁷-RKI (SEQ ID NO: 13806), YVPKPXX (SEQ ID NO: 13664):RPVQ-AA¹⁷-RKI (SEQ ID NO: 13806), TVPKPXX (SEQ ID NO: 13663):RPVQ-AA¹⁷-RKI (SEQ ID NO: 13806), AVPKAXX (SEQ ID NO: 13649):RPVQ-AA¹⁷-RKI (SEQ ID NO: 13806), KVGKAXX (SEQ ID NO: 13656):RPVQ-AA¹⁷-RKI (SEQ ID NO: 13806), KASKAXX (SEQ ID NO: 13654):RPVQ-AA¹⁷-RKI (SEQ ID NO: 13806), GSAGPXX (SEQ ID NO: 13651):RPVQ-AA¹⁷-RKI (SEQ ID NO: 13806), AAPASXX (SEQ ID NO: 13646):RPVQ-AA¹⁷-RKI (SEQ ID NO: 13806), STPPTXX (SEQ ID NO: 13662):RPVQ-AA¹⁷-RKI (SEQ ID NO: 13806), HVPKPXX (SEQ ID NO: 13652):RPVQ-AA¹⁷-RKI (SEQ ID NO: 13806), RVPSTXX (SEQ ID NO: 13659):RPVQ-AA¹⁷-RKI (SEQ ID NO: 13806), ASAAPXX (SEQ ID NO: 13647):RPVQ-AA¹⁷-RKI (SEQ ID NO: 13806), ASASPXX (SEQ ID NO: 13648):RPVQ-AA¹⁷-RKI (SEQ ID NO: 13806) and NDEGLEX (SEQ ID NO: 13657):RPVQ-AA¹⁷-RKI (SEQ ID NO: 13806); and wherein AA¹⁷ is selected from the group consisting of G, A, V, L, I, P, F, M, W, T and S (in particular is selected from the group consisting of M, I, L, V and T).

[0308] In particular, in certain embodiments, the pair PEP12:PEP9 is selected from the group consisting of GIPEPXXVPTKM (SEQ ID NO: 13703):SAIS-AA¹⁷-LYL (SEQ ID NO: 13808), HVTKPTXVPTKL (SEQ ID NO: 13729):SAIS-AA¹⁷-LYL (SEQ ID NO: 13808), YVPKPXXVPTKL (SEQ ID NO: 13799):SAIS-AA¹⁷-LYL (SEQ ID NO: 13808), TVPKPXXVPTQL (SEQ ID NO: 13791):SAIS-AA¹⁷-LYL (SEQ ID NO: 13808), AVPKAXXVPTKL (SEQ ID NO: 13695):SAIS-AA¹⁷-LYL (SEQ ID NO: 13808), KVGKAXXVPTKL (SEQ ID NO: 13753):SAIS-AA¹⁷-LYL (SEQ ID NO: 13808), KASKAXXVPTKL (SEQ ID NO: 13737):SAIS-AA¹⁷-LYL (SEQ ID NO: 13808), GSAGPXXVPTKM (SEQ ID NO: 13711):SAIS-AA¹⁷-LYL (SEQ ID NO: 13808), AAPASXXVPTRL (SEQ ID NO: 13671):SAIS-AA¹⁷-LYL (SEQ ID NO: 13808), STPPTXXVPTRL (SEQ ID NO: 13783):SAIS-AA¹⁷-LYL (SEQ ID NO: 13808), HVPKPXXVPTKL (SEQ ID NO: 13719):SAIS-AA¹⁷-LYL (SEQ ID NO: 13808), RVPSTXXVPTKT (SEQ ID NO: 13765):SAIS-AA¹⁷-LYL (SEQ ID NO: 13808), ASAAPXXVPTAL (SEQ ID NO: 13679):SAIS-AA¹⁷-LYL (SEQ ID NO: 13808), ASASPXXVPTDL (SEQ ID NO: 13687):SAIS-AA¹⁷-LYL (SEQ ID NO: 13808), GIPEPXXVPEKM (SEQ ID NO: 13701):SAIS-AA¹⁷-LYL (SEQ ID NO: 13808), HVTKPTXAPTKL (SEQ ID NO: 13721):SAIS-AA¹⁷-LYL (SEQ ID NO: 13808), YVPKPXXAPTKL (SEQ ID NO: 13793):SAIS-AA¹⁷-LYL (SEQ ID NO: 13808), TVPKPXXAPTQL (SEQ ID NO: 13785):SAIS-AA¹⁷-LYL (SEQ ID NO: 13808), AVPKAXXAPTKL (SEQ ID NO: 13689):SAIS-AA¹⁷-LYL (SEQ ID NO: 13808), GSAGPXXTPTKM (SEQ ID NO: 13707):SAIS-AA¹⁷-LYL (SEQ ID NO: 13808), AAPASXXVPARL (SEQ ID NO: 13668):SAIS-AA¹⁷-LYL (SEQ ID NO: 13808), HVPKPXXAPTKL (SEQ ID NO: 13713):SAIS-AA¹⁷-LYL (SEQ ID NO: 13808), RVPSTXXAPVKT (SEQ ID NO: 13760):SAIS-AA¹⁷-LYL (SEQ ID NO: 13808), ASAAPXXVPQAL (SEQ ID NO: 13678):SAIS-AA¹⁷-LYL (SEQ ID NO: 13808), ASASPXXVSQDL (SEQ ID NO: 13688):SAIS-AA¹⁷-LYL (SEQ ID NO: 13808), ASASPXXVPQDL (SEQ ID NO: 13686):SAIS-AA¹⁷-LYL (SEQ ID NO: 13808), SSVKXQPSRVHH (SEQ ID NO: 13775):SAIS-AA¹⁷-LYL (SEQ ID NO: 13808), RNVQXRPTQVQL (SEQ ID NO: 13758):SAIS-AA¹⁷-LYL (SEQ ID NO: 13808), KIPKAXXVPEEL (SEQ ID NO: 13743):SSLS-AA¹⁷-LFF (SEQ ID NO: 13815), SIPKAXXVPEEL (SEQ ID NO: 13771):SSLS-AA¹⁷-LFF (SEQ ID NO: 13815), HVTKPTXVPEKL (SEQ ID NO: 13727):SSLS-AA¹⁷-LFF (SEQ ID NO: 13815), YVPKPXXVPEKL (SEQ ID NO: 13797):SSLS-AA¹⁷-LFF (SEQ ID NO: 13815), TVPKPXXVPEQL (SEQ ID NO: 13789):SSLS-AA¹⁷-LFF (SEQ ID NO: 13815), AVPKAXXVPEKL (SEQ ID NO: 13693):SSLS-AA¹⁷-LFF (SEQ ID NO: 13815), KVGKAXXVPEKL (SEQ ID NO: 13751):SSLS-AA¹⁷-LFF (SEQ ID NO: 13815), KASKAXXVPEKL (SEQ ID NO: 13735):SSLS-AA¹⁷-LFF (SEQ ID NO: 13815), GSAGPXXVPEKM (SEQ ID NO: 13709):SSLS-AA¹⁷-LFF (SEQ ID NO: 13815), AAPASXXVPERL (SEQ ID NO: 13669):SSLS-AA¹⁷-LFF (SEQ ID NO: 13815), STPPTXXVPERL (SEQ ID NO: 13781):SSLS-AA¹⁷-LFF (SEQ ID NO: 13815), HVPKPXXVPEKL (SEQ ID NO: 13717):SSLS-AA¹⁷-LFF (SEQ ID NO: 13815), RVPSTXXVPEKT (SEQ ID NO: 13763):SSLS-AA¹⁷-LFF (SEQ ID NO: 13815), ASAAPXXVPEAL (SEQ ID NO: 13677):SSLS-AA¹⁷-LFF (SEQ ID NO: 13815), ASASPXXVPEDL (SEQ ID NO: 13685):SSLS-AA¹⁷-LFF (SEQ ID NO: 13815), KIPKAXXVPTEL (SEQ ID NO: 13745):SSLS-AA¹⁷-LFF (SEQ ID NO: 13815), SIPKAXXVPTEL (SEQ ID NO: 13773):SSLS-AA¹⁷-LFF (SEQ ID NO: 13815), HVTKPTXAPTKL (SEQ ID NO: 13721):SSLS-AA¹⁷-LFF (SEQ ID NO: 13815), YVPKPXXAPTKL (SEQ ID NO: 13793):SSLS-AA¹⁷-LFF (SEQ ID NO: 13815), TVPKPXXAPTQL (SEQ ID NO: 13785):SSLS-AA¹⁷-LFF (SEQ ID NO: 13815), AVPKAXXAPTKL (SEQ ID NO: 13689):SSLS-AA¹⁷-LFF (SEQ ID NO: 13815), KVGKAXXVPTKL (SEQ ID NO: 13753):SSLS-AA¹⁷-LFF (SEQ ID NO: 13815), KASKAXXVPTKL (SEQ ID NO: 13737):SSLS-AA¹⁷-LFF (SEQ ID NO: 13815), GSAGPXXTPTKM (SEQ ID NO: 13707):SSLS-AA¹⁷-LFF (SEQ ID NO: 13815), AAPASXXVPARL (SEQ ID NO: 13668):SSLS-AA¹⁷-LFF (SEQ ID NO: 13815), STPPTXXVPTRL (SEQ ID NO: 13783):SSLS-AA¹⁷-LFF (SEQ ID NO: 13815), HVPKPXXAPTKL (SEQ ID NO: 13713):SSLS-AA¹⁷-LFF (SEQ ID NO: 13815), RVPSTXXAPVKT (SEQ ID NO: 13760):SSLS-AA¹⁷-LFF (SEQ ID NO: 13815), ASAAPXXVPQAL (SEQ ID NO: 13678):SSLS-AA¹⁷-LFF (SEQ ID NO: 13815), ASASPXXVSQDL (SEQ ID NO: 13688):SSLS-AA¹⁷-LFF (SEQ ID NO: 13815), ASASPXXVPQDL (SEQ ID NO: 13686):SSLS-AA¹⁷-LFF (SEQ ID NO: 13815), NDEGLEXVPTEE (SEQ ID NO: 13755):SSLS-AA¹⁷-LFF (SEQ ID NO: 13815), NDEGLEXVPTGQ (SEQ ID NO: 13756):SSLS-AA¹⁷-LFF (SEQ ID NO: 13815), SSVKXQPSRVHH (SEQ ID NO: 13775):SSLS-AA¹⁷-LFF (SEQ ID NO: 13815), RNVQXRPTQVQL (SEQ ID NO: 13758):SSLS-AA¹⁷-LFF (SEQ ID NO: 13815), KIPKAXXAPTEL (SEQ ID NO: 13739):NAIS-AA¹⁷-LYF (SEQ ID NO: 13805), GIPEPXXAPTKM (SEQ ID NO: 13697):NAIS-AA¹⁷-LYF (SEQ ID NO: 13805), SIPKAXXAPTEL (SEQ ID NO: 13767):NAIS-AA¹⁷-LYF (SEQ ID NO: 13805), AVPKAXXAPTKL (SEQ ID NO: 13689):NAIS-AA¹⁷-LYF (SEQ ID NO: 13805), KVGKAXXAPTKL (SEQ ID NO: 13747):NAIS-AA¹⁷-LYF (SEQ ID NO: 13805), KASKAXXAPTKL (SEQ ID NO: 13731):NAIS-AA¹⁷-LYF (SEQ ID NO: 13805), GSAGPXXAPTKM (SEQ ID NO: 13705):NAIS-AA¹⁷-LYF (SEQ ID NO: 13805), AAPASXXAPTRL (SEQ ID NO: 13665):NAIS-AA¹⁷-LYF (SEQ ID NO: 13805), STPPTXXAPTRL (SEQ ID NO: 13777):NAIS-AA¹⁷-LYF (SEQ ID NO: 13805), RVPSTXXAPTKT (SEQ ID NO: 13759):NAIS-AA¹⁷-LYF (SEQ ID NO: 13805), ASAAPXXAPTAL (SEQ ID NO: 13673):NAIS-AA¹⁷-LYF (SEQ ID NO: 13805), ASASPXXAPTDL (SEQ ID NO: 13681):NAIS-AA¹⁷-LYF (SEQ ID NO: 13805), KIPKAXXVPTEL (SEQ ID NO: 13745):NAIS-AA¹⁷-LYF (SEQ ID NO: 13805), GIPEPXXVPEKM (SEQ ID NO: 13701):NAIS-AA¹⁷-LYF (SEQ ID NO: 13805), SIPKAXXVPTEL (SEQ ID NO: 13773):NAIS-AA¹⁷-LYF (SEQ ID NO: 13805), KVGKAXXVPTKL (SEQ ID NO: 13753):NAIS-AA¹⁷-LYF (SEQ ID NO: 13805), KASKAXXVPTKL (SEQ ID NO: 13737):NAIS-AA¹⁷-LYF (SEQ ID NO: 13805), GSAGPXXTPTKM (SEQ ID NO: 13707):NAIS-AA¹⁷-LYF (SEQ ID NO: 13805), AAPASXXVPARL (SEQ ID NO: 13668):NAIS-AA¹⁷-LYF (SEQ ID NO: 13805), STPPTXXVPTRL (SEQ ID NO: 13783):NAIS-AA¹⁷-LYF (SEQ ID NO: 13805), RVPSTXXAPVKT (SEQ ID NO: 13760):NAIS-AA¹⁷-LYF (SEQ ID NO: 13805), ASAAPXXVPQAL (SEQ ID NO: 13678):NAIS-AA¹⁷-LYF (SEQ ID NO: 13805), ASASPXXVSQDL (SEQ ID NO: 13688):NAIS-AA¹⁷-LYF (SEQ ID NO: 13805), ASASPXXVPQDL (SEQ ID NO: 13686):NAIS-AA¹⁷-LYF (SEQ ID NO: 13805), NDEGLEXVPTEE (SEQ ID NO: 13755):NAIS-AA¹⁷-LYF (SEQ ID NO: 13805), NDEGLEXVPTGQ (SEQ ID NO: 13756):NAIS-AA¹⁷-LYF (SEQ ID NO: 13805), SSVKXQPSRVHH (SEQ ID NO: 13775):NAIS-AA¹⁷-LYF (SEQ ID NO: 13805), RNVQXRPTQVQL (SEQ ID NO: 13758):NAIS-AA¹⁷-LYF (SEQ ID NO: 13805), KIPKAXXAPTEL (SEQ ID NO: 13739):SATS-AA¹⁷-LYY (SEQ ID NO: 13809), GIPEPXXAPTKM (SEQ ID NO: 13697):SATS-AA¹⁷-LYY (SEQ ID NO: 13809), SIPKAXXAPTEL (SEQ ID NO: 13767):SATS-AA¹⁷-LYY (SEQ ID NO: 13809), HVTKPTXAPTKL (SEQ ID NO: 13721):SATS-AA¹⁷-LYY (SEQ ID NO: 13809), YVPKPXXAPTKL (SEQ ID NO: 13793):SATS-AA¹⁷-LYY (SEQ ID NO: 13809), TVPKPXXAPTQL (SEQ ID NO: 13785):SATS-AA¹⁷-LYY (SEQ ID NO: 13809), KVGKAXXAPTKL (SEQ ID NO: 13747):SATS-AA¹⁷-LYY (SEQ ID NO: 13809), KASKAXXAPTKL (SEQ ID NO: 13731):SATS-AA¹⁷-LYY (SEQ ID NO: 13809), GSAGPXXAPTKM (SEQ ID NO: 13705):SATS-AA¹⁷-LYY (SEQ ID NO: 13809), AAPASXXAPTRL (SEQ ID NO: 13665):SATS-AA¹⁷-LYY (SEQ ID NO: 13809), STPPTXXAPTRL (SEQ ID NO: 13777):SATS-AA¹⁷-LYY (SEQ ID NO: 13809), HVPKPXXAPTKL (SEQ ID NO: 13713):SATS-AA¹⁷-LYY (SEQ ID NO: 13809), RVPSTXXAPTKT (SEQ ID NO: 13759):SATS-AA¹⁷-LYY (SEQ ID NO: 13809), ASAAPXXAPTAL (SEQ ID NO: 13673):SATS-AA¹⁷-LYY (SEQ ID NO: 13809), ASASPXXAPTDL (SEQ ID NO: 13681):SATS-AA¹⁷-LYY (SEQ ID NO: 13809), KIPKAXXVPTEL (SEQ ID NO: 13745):SATS-AA¹⁷-LYY (SEQ ID NO: 13809), GIPEPXXVPEKM (SEQ ID NO: 13701):SATS-AA¹⁷-LYY (SEQ ID NO: 13809), SIPKAXXVPTEL (SEQ ID NO: 13773):SATS-AA¹⁷-LYY (SEQ ID NO: 13809), KVGKAXXVPTKL (SEQ ID NO: 13753):SATS-AA¹⁷-LYY (SEQ ID NO: 13809), KASKAXXVPTKL (SEQ ID NO: 13737):SATS-AA¹⁷-LYY (SEQ ID NO: 13809), GSAGPXXTPTKM (SEQ ID NO: 13707):SATS-AA¹⁷-LYY (SEQ ID NO: 13809), AAPASXXVPARL (SEQ ID NO: 13668):SATS-AA¹⁷-LYY (SEQ ID NO: 13809), STPPTXXVPTRL (SEQ ID NO: 13783):SATS-AA¹⁷-LYY (SEQ ID NO: 13809), RVPSTXXAPVKT (SEQ ID NO: 13760):SATS-AA¹⁷-LYY (SEQ ID NO: 13809), ASAAPXXVPQAL (SEQ ID NO: 13678):SATS-AA¹⁷-LYY (SEQ ID NO: 13809), ASASPXXVSQDL (SEQ ID NO: 13688):SATS-AA¹⁷-LYY (SEQ ID NO: 13809), ASASPXXVPQDL (SEQ ID NO: 13686):SATS-AA¹⁷-LYY (SEQ ID NO: 13809), NDEGLEXVPTEE (SEQ ID NO: 13755):SATS-AA¹⁷-LYY (SEQ ID NO: 13809), NDEGLEXVPTGQ (SEQ ID NO: 13756):SATS-AA¹⁷-LYY (SEQ ID NO: 13809), SSVKXQPSRVHH (SEQ ID NO: 13775):SATS-AA¹⁷-LYY (SEQ ID NO: 13809), RNVQXRPTQVQL (SEQ ID NO: 13758):SATS-AA¹⁷-LYY (SEQ ID NO: 13809), KIPKAXXVPTEL (SEQ ID NO: 13745):SPIS-AA¹⁷-LYK (SEQ ID NO: 13814), GIPEPXXVPTKM (SEQ ID NO: 13703):SPIS-AA¹⁷-LYK (SEQ ID NO: 13814), SIPKAXXVPTEL (SEQ ID NO: 13773):SPIS-AA¹⁷-LYK (SEQ ID NO: 13814), HVTKPTXVPTKL (SEQ ID NO: 13729):SPIS-AA¹⁷-LYK (SEQ ID NO: 13814), YVPKPXXVPTKL (SEQ ID NO: 13799):SPIS-AA¹⁷-LYK (SEQ ID NO: 13814), TVPKPXXVPTQL (SEQ ID NO: 13791):SPIS-AA¹⁷-LYK (SEQ ID NO: 13814), AVPKAXXVPTKL (SEQ ID NO: 13695):SPIS-AA¹⁷-LYK (SEQ ID NO: 13814), KASKAXXVPTKL (SEQ ID NO: 13737):SPIS-AA¹⁷-LYK (SEQ ID NO: 13814), GSAGPXXVPTKM (SEQ ID NO: 13711):SPIS-AA¹⁷-LYK (SEQ ID NO: 13814), AAPASXXVPTRL (SEQ ID NO: 13671):SPIS-AA¹⁷-LYK (SEQ ID NO: 13814), STPPTXXVPTRL (SEQ ID NO: 13783):SPIS-AA¹⁷-LYK (SEQ ID NO: 13814), HVPKPXXVPTKL (SEQ ID NO: 13719):SPIS-AA¹⁷-LYK (SEQ ID NO: 13814), RVPSTXXVPTKT (SEQ ID NO: 13765):SPIS-AA¹⁷-LYK (SEQ ID NO: 13814), ASAAPXXVPTAL (SEQ ID NO: 13679):SPIS-AA¹⁷-LYK (SEQ ID NO: 13814), ASASPXXVPTDL (SEQ ID NO: 13687):SPIS-AA¹⁷-LYK (SEQ ID NO: 13814), GIPEPXXVPEKM (SEQ ID NO: 13701):SPIS-AA¹⁷-LYK (SEQ ID NO: 13814), HVTKPTXAPTKL (SEQ ID NO: 13721):SPIS-AA¹⁷-LYK (SEQ ID NO: 13814), YVPKPXXAPTKL (SEQ ID NO: 13793):SPIS-AA¹⁷-LYK (SEQ ID NO: 13814), TVPKPXXAPTQL (SEQ ID NO: 13785):SPIS-AA¹⁷-LYK (SEQ ID NO: 13814), AVPKAXXAPTKL (SEQ ID NO: 13689):SPIS-AA¹⁷-LYK (SEQ ID NO: 13814), GSAGPXXTPTKM (SEQ ID NO: 13707):SPIS-AA¹⁷-LYK (SEQ ID NO: 13814), AAPASXXVPARL (SEQ ID NO: 13668):SPIS-AA¹⁷-LYK (SEQ ID NO: 13814), HVPKPXXAPTKL (SEQ ID NO: 13713):SPIS-AA¹⁷-LYK (SEQ ID NO: 13814), RVPSTXXAPVKT (SEQ ID NO: 13760):SPIS-AA¹⁷-LYK (SEQ ID NO: 13814), ASAAPXXVPQAL (SEQ ID NO: 13678):SPIS-AA¹⁷-LYK (SEQ ID NO: 13814), ASASPXXVSQDL (SEQ ID NO: 13688):SPIS-AA¹⁷-LYK (SEQ ID NO: 13814), ASASPXXVPQDL (SEQ ID NO: 13686):SPIS-AA¹⁷-LYK (SEQ ID NO: 13814), SSVKXQPSRVHH (SEQ ID NO: 13775):SPIS-AA¹⁷-LYK (SEQ ID NO: 13814), RNVQXRPTQVQL (SEQ ID NO: 13758):SPIS-AA¹⁷-LYK (SEQ ID NO: 13814), KIPKAXXVPTEL (SEQ ID NO: 13745):EPIS-AA¹⁷-LYL (SEQ ID NO: 13801), GIPEPXXVPTKM (SEQ ID NO: 13703):EPIS-AA¹⁷-LYL (SEQ ID NO: 13801), SIPKAXXVPTEL (SEQ ID NO: 13773):EPIS-AA¹⁷-LYL (SEQ ID NO: 13801), HVTKPTXVPTKL (SEQ ID NO: 13729):EPIS-AA¹⁷-LYL (SEQ ID NO: 13801), YVPKPXXVPTKL (SEQ ID NO: 13799):EPIS-AA¹⁷-LYL (SEQ ID NO: 13801), TVPKPXXVPTQL (SEQ ID NO: 13791):EPIS-AA¹⁷-LYL (SEQ ID NO: 13801), AVPKAXXVPTKL (SEQ ID NO: 13695):EPIS-AA¹⁷-LYL (SEQ ID NO: 13801), KVGKAXXVPTKL (SEQ ID NO: 13753):EPIS-AA¹⁷-LYL (SEQ ID NO: 13801), GSAGPXXVPTKM (SEQ ID NO: 13711):EPIS-AA¹⁷-LYL (SEQ ID NO: 13801), AAPASXXVPTRL (SEQ ID NO: 13671):EPIS-AA¹⁷-LYL (SEQ ID NO: 13801), STPPTXXVPTRL (SEQ ID NO: 13783):EPIS-AA¹⁷-LYL (SEQ ID NO: 13801), HVPKPXXVPTKL (SEQ ID NO: 13719):EPIS-AA¹⁷-LYL (SEQ ID NO: 13801), RVPSTXXVPTKT (SEQ ID NO: 13765):EPIS-AA¹⁷-LYL (SEQ ID NO: 13801), ASAAPXXVPTAL (SEQ ID NO: 13679):EPIS-AA¹⁷-LYL (SEQ ID NO: 13801), ASASPXXVPTDL (SEQ ID NO: 13687):EPIS-AA¹⁷-LYL (SEQ ID NO: 13801), GIPEPXXVPEKM (SEQ ID NO: 13701):EPIS-AA¹⁷-LYL (SEQ ID NO: 13801), HVTKPTXAPTKL (SEQ ID NO: 13721):EPIS-AA¹⁷-LYL (SEQ ID NO: 13801), YVPKPXXAPTKL (SEQ ID NO: 13793):EPIS-AA¹⁷-LYL (SEQ ID NO: 13801), TVPKPXXAPTQL (SEQ ID NO: 13785):EPIS-AA¹⁷-LYL (SEQ ID NO: 13801), AVPKAXXAPTKL (SEQ ID NO: 13689):EPIS-AA¹⁷-LYL (SEQ ID NO: 13801), GSAGPXXTPTKM (SEQ ID NO: 13707):EPIS-AA¹⁷-LYL (SEQ ID NO: 13801), AAPASXXVPARL (SEQ ID NO: 13668):EPIS-AA¹⁷-LYL (SEQ ID NO: 13801), HVPKPXXAPTKL (SEQ ID NO: 13713):EPIS-AA¹⁷-LYL (SEQ ID NO: 13801), RVPSTXXAPVKT (SEQ ID NO: 13760):EPIS-AA¹⁷-LYL (SEQ ID NO: 13801), ASAAPXXVPQAL (SEQ ID NO: 13678):EPIS-AA¹⁷-LYL (SEQ ID NO: 13801), ASASPXXVSQDL (SEQ ID NO: 13688):EPIS-AA¹⁷-LYL (SEQ ID NO: 13801), ASASPXXVPQDL (SEQ ID NO: 13686):EPIS-AA¹⁷-LYL (SEQ ID NO: 13801), SSVKXQPSRVHH (SEQ ID NO: 13775):EPIS-AA¹⁷-LYL (SEQ ID NO: 13801), RNVQXRPTQVQL (SEQ ID NO: 13758):EPIS-AA¹⁷-LYL (SEQ ID NO: 13801), KIPKAXXTPTEL (SEQ ID NO: 13741):SPIN-AA¹⁷-LYF (SEQ ID NO: 13811), GIPEPXXTPTKM (SEQ ID NO: 13699):SPIN-AA¹⁷-LYF (SEQ ID NO: 13811), SIPKAXXTPTEL (SEQ ID NO: 13769):SPIN-AA¹⁷-LYF (SEQ ID NO: 13811), HVTKPTXTPTKL (SEQ ID NO: 13724):SPIN-AA¹⁷-LYF (SEQ ID NO: 13811), YVPKPXXTPTKL (SEQ ID NO: 13795):SPIN-AA¹⁷-LYF (SEQ ID NO: 13811), TVPKPXXTPTQL (SEQ ID NO: 13787):SPIN-AA¹⁷-LYF (SEQ ID NO: 13811), AVPKAXXTPTKL (SEQ ID NO: 13691):SPIN-AA¹⁷-LYF (SEQ ID NO: 13811), KVGKAXXTPTKL (SEQ ID NO: 13749):SPIN-AA¹⁷-LYF (SEQ ID NO: 13811), KASKAXXTPTKL (SEQ ID NO: 13733):SPIN-AA¹⁷-LYF (SEQ ID NO: 13811), AAPASXXTPTRL (SEQ ID NO: 13667):SPIN-AA¹⁷-LYF (SEQ ID NO: 13811), STPPTXXTPTRL (SEQ ID NO: 13779):SPIN-AA¹⁷-LYF (SEQ ID NO: 13811), HVPKPXXTPTKL (SEQ ID NO: 13715):SPIN-AA¹⁷-LYF (SEQ ID NO: 13811), RVPSTXXTPTKT (SEQ ID NO: 13761):SPIN-AA¹⁷-LYF (SEQ ID NO: 13811), ASAAPXXTPTAL (SEQ ID NO: 13675):SPIN-AA¹⁷-LYF (SEQ ID NO: 13811), ASASPXXTPTDL (SEQ ID NO: 13683):SPIN-AA¹⁷-LYF (SEQ ID NO: 13811), KIPKAXXVPTEL (SEQ ID NO: 13745):SPIN-AA¹⁷-LYF (SEQ ID NO: 13811), GIPEPXXVPEKM (SEQ ID NO: 13701):SPIN-AA¹⁷-LYF (SEQ ID NO: 13811), SIPKAXXVPTEL (SEQ ID NO: 13773):SPIN-AA¹⁷-LYF (SEQ ID NO: 13811), HVTKPTXAPTKL (SEQ ID NO: 13721):SPIN-AA¹⁷-LYF (SEQ ID NO: 13811), YVPKPXXAPTKL (SEQ ID NO: 13793):SPIN-AA¹⁷-LYF (SEQ ID NO: 13811), TVPKPXXAPTQL (SEQ ID NO: 13785):SPIN-AA¹⁷-LYF (SEQ ID NO: 13811), AVPKAXXAPTKL (SEQ ID NO: 13689):SPIN-AA¹⁷-LYF (SEQ ID NO: 13811), KVGKAXXVPTKL (SEQ ID NO: 13753):SPIN-AA¹⁷-LYF (SEQ ID NO: 13811), KASKAXXVPTKL (SEQ ID NO: 13737):SPIN-AA¹⁷-LYF (SEQ ID NO: 13811), AAPASXXVPARL (SEQ ID NO: 13668):SPIN-AA¹⁷-LYF (SEQ ID NO: 13811), STPPTXXVPTRL (SEQ ID NO: 13783):SPIN-AA¹⁷-LYF (SEQ ID NO: 13811), HVPKPXXAPTKL (SEQ ID NO: 13713):SPIN-AA¹⁷-LYF (SEQ ID NO: 13811), RVPSTXXAPVKT (SEQ ID NO: 13760):SPIN-AA¹⁷-LYF (SEQ ID NO: 13811), ASAAPXXVPQAL (SEQ ID NO: 13678):SPIN-AA¹⁷-LYF (SEQ ID NO: 13811), ASASPXXVSQDL (SEQ ID NO: 13688):SPIN-AA¹⁷-LYF (SEQ ID NO: 13811), ASASPXXVPQDL (SEQ ID NO: 13686):SPIN-AA¹⁷-LYF (SEQ ID NO: 13811), NDEGLEXVPTEE (SEQ ID NO: 13755):SPIN-AA¹⁷-LYF (SEQ ID NO: 13811), NDEGLEXVPTGQ (SEQ ID NO: 13756):SPIN-AA¹⁷-LYF (SEQ ID NO: 13811), SSVKXQPSRVHH (SEQ ID NO: 13775):SPIN-AA¹⁷-LYF (SEQ ID NO: 13811), RNVQXRPTQVQL (SEQ ID NO: 13758):SPIN-AA¹⁷-LYF (SEQ ID NO: 13811), KIPKAXXVPAEL (SEQ ID NO: 13742):SPIS-AA¹⁷-LYI (SEQ ID NO: 13813), GIPEPXXVPAKM (SEQ ID NO: 13700):SPIS-AA¹⁷-LYI (SEQ ID NO: 13813), SIPKAXXVPAEL (SEQ ID NO: 13770):SPIS-AA¹⁷-LYI (SEQ ID NO: 13813), HVTKPTXVPAKL (SEQ ID NO: 13726):SPIS-AA¹⁷-LYI (SEQ ID NO: 13813), YVPKPXXVPAKL (SEQ ID NO: 13796):SPIS-AA¹⁷-LYI (SEQ ID NO: 13813), TVPKPXXVPAQL (SEQ ID NO: 13788):SPIS-AA¹⁷-LYI (SEQ ID NO: 13813), AVPKAXXVPAKL (SEQ ID NO: 13692):SPIS-AA¹⁷-LYI (SEQ ID NO: 13813), KVGKAXXVPAKL (SEQ ID NO: 13750):SPIS-AA¹⁷-LYI (SEQ ID NO: 13813), KASKAXXVPAKL (SEQ ID NO: 13734):SPIS-AA¹⁷-LYI (SEQ ID NO: 13813), GSAGPXXVPAKM (SEQ ID NO: 13708):SPIS-AA¹⁷-LYI (SEQ ID NO: 13813), STPPTXXVPARL (SEQ ID NO: 13780):SPIS-AA¹⁷-LYI (SEQ ID NO: 13813), HVPKPXXVPAKL (SEQ ID NO: 13716):SPIS-AA¹⁷-LYI (SEQ ID NO: 13813), RVPSTXXVPAKT (SEQ ID NO: 13762):SPIS-AA¹⁷-LYI (SEQ ID NO: 13813), ASAAPXXVPAAL (SEQ ID NO: 13676):SPIS-AA¹⁷-LYI (SEQ ID NO: 13813), ASASPXXVPADL (SEQ ID NO: 13684):SPIS-AA¹⁷-LYI (SEQ ID NO: 13813), KIPKAXXVPTEL (SEQ ID NO: 13745):SPIS-AA¹⁷-LYI (SEQ ID NO: 13813), GIPEPXXVPEKM (SEQ ID NO: 13701):SPIS-AA¹⁷-LYI (SEQ ID NO: 13813), SIPKAXXVPTEL (SEQ ID NO: 13773):SPIS-AA¹⁷-LYI (SEQ ID NO: 13813), HVTKPTXAPTKL (SEQ ID NO: 13721):SPIS-AA¹⁷-LYI (SEQ ID NO: 13813), YVPKPXXAPTKL (SEQ ID NO: 13793):SPIS-AA¹⁷-LYI (SEQ ID NO: 13813), TVPKPXXAPTQL (SEQ ID NO: 13785):SPIS-AA¹⁷-LYI (SEQ ID NO: 13813), AVPKAXXAPTKL (SEQ ID NO: 13689):SPIS-AA¹⁷-LYI (SEQ ID NO: 13813), KVGKAXXVPTKL (SEQ ID NO: 13753):SPIS-AA¹⁷-LYI (SEQ ID NO: 13813), KASKAXXVPTKL (SEQ ID NO: 13737):SPIS-AA¹⁷-LYI (SEQ ID NO: 13813), GSAGPXXTPTKM (SEQ ID NO: 13707):SPIS-AA¹⁷-LYI (SEQ ID NO: 13813), STPPTXXVPTRL (SEQ ID NO: 13783):SPIS-AA¹⁷-LYI (SEQ ID NO: 13813), HVPKPXXAPTKL (SEQ ID NO: 13713):SPIS-AA¹⁷-LYI (SEQ ID NO: 13813), RVPSTXXAPVKT (SEQ ID NO: 13760):SPIS-AA¹⁷-LYI (SEQ ID NO: 13813), ASAAPXXVPQAL (SEQ ID NO: 13678):SPIS-AA¹⁷-LYI (SEQ ID NO: 13813), ASASPXXVSQDL (SEQ ID NO: 13688):SPIS-AA¹⁷-LYI (SEQ ID NO: 13813), ASASPXXVPQDL (SEQ ID NO: 13686):SPIS-AA¹⁷-LYI (SEQ ID NO: 13813), NDEGLEXVPTEE (SEQ ID NO: 13755):SPIS-AA¹⁷-LYI (SEQ ID NO: 13813), NDEGLEXVPTGQ (SEQ ID NO: 13756):SPIS-AA¹⁷-LYI (SEQ ID NO: 13813), SSVKXQPSRVHH (SEQ ID NO: 13775):SPIS-AA¹⁷-LYI (SEQ ID NO: 13813), RNVQXRPTQVQL (SEQ ID NO: 13758):SPIS-AA¹⁷-LYI (SEQ ID NO: 13813), KIPKAXXVPTEL (SEQ ID NO: 13745):SPIS-AA¹⁷-LFI (SEQ ID NO: 13812), GIPEPXXVPTKM (SEQ ID NO: 13703):SPIS-AA¹⁷-LFI (SEQ ID NO: 13812), SIPKAXXVPTEL (SEQ ID NO: 13773):SPIS-AA¹⁷-LFI (SEQ ID NO: 13812), HVTKPTXVPTKL (SEQ ID NO: 13729):SPIS-AA¹⁷-LFI (SEQ ID NO: 13812), YVPKPXXVPTKL (SEQ ID NO: 13799):SPIS-AA¹⁷-LFI (SEQ ID NO: 13812), TVPKPXXVPTQL (SEQ ID NO: 13791):SPIS-AA¹⁷-LFI (SEQ ID NO: 13812), AVPKAXXVPTKL (SEQ ID NO: 13695):SPIS-AA¹⁷-LFI (SEQ ID NO: 13812), KVGKAXXVPTKL (SEQ ID NO: 13753):SPIS-AA¹⁷-LFI (SEQ ID NO: 13812), KASKAXXVPTKL (SEQ ID NO: 13737):SPIS-AA¹⁷-LFI (SEQ ID NO: 13812), GSAGPXXVPTKM (SEQ ID NO: 13711):SPIS-AA¹⁷-LFI (SEQ ID NO: 13812), AAPASXXVPTRL (SEQ ID NO: 13671):SPIS-AA¹⁷-LFI (SEQ ID NO: 13812), HVPKPXXVPTKL (SEQ ID NO: 13719):SPIS-AA¹⁷-LFI (SEQ ID NO: 13812), RVPSTXXVPTKT (SEQ ID NO: 13765):SPIS-AA¹⁷-LFI (SEQ ID NO: 13812), ASAAPXXVPTAL (SEQ ID NO: 13679):SPIS-AA¹⁷-LFI (SEQ ID NO: 13812), ASASPXXVPTDL (SEQ ID NO: 13687):SPIS-AA¹⁷-LFI (SEQ ID NO: 13812), GIPEPXXVPEKM (SEQ ID NO: 13701):SPIS-AA¹⁷-LFI (SEQ ID NO: 13812), HVTKPTXAPTKL (SEQ ID NO: 13721):SPIS-AA¹⁷-LFI (SEQ ID NO: 13812), YVPKPXXAPTKL (SEQ ID NO: 13793):SPIS-AA¹⁷-LFI (SEQ ID NO: 13812), TVPKPXXAPTQL (SEQ ID NO: 13785):SPIS-AA¹⁷-LFI (SEQ ID NO: 13812), AVPKAXXAPTKL (SEQ ID NO: 13689):SPIS-AA¹⁷-LFI (SEQ ID NO: 13812), GSAGPXXTPTKM (SEQ ID NO: 13707):SPIS-AA¹⁷-LFI (SEQ ID NO: 13812), AAPASXXVPARL (SEQ ID NO: 13668):SPIS-AA¹⁷-LFI (SEQ ID NO: 13812), HVPKPXXAPTKL (SEQ ID NO: 13713):SPIS-AA¹⁷-LFI (SEQ ID NO: 13812), RVPSTXXAPVKT (SEQ ID NO: 13760):SPIS-AA¹⁷-LFI (SEQ ID NO: 13812), ASAAPXXVPQAL (SEQ ID NO: 13678):SPIS-AA¹⁷-LFI (SEQ ID NO: 13812), ASASPXXVSQDL (SEQ ID NO: 13688):SPIS-AA¹⁷-LFI (SEQ ID NO: 13812), ASASPXXVPQDL (SEQ ID NO: 13686):SPIS-AA¹⁷-LFI (SEQ ID NO: 13812), SSVKXQPSRVHH (SEQ ID NO: 13775):SPIS-AA¹⁷-LFI (SEQ ID NO: 13812), RNVQXRPTQVQL (SEQ ID NO: 13758):SPIS-AA¹⁷-LFI (SEQ ID NO: 13812), KIPKAXXAPVEL (SEQ ID NO: 13740):KPLS-AA¹⁷-LYV (SEQ ID NO: 13804), GIPEPXXAPVKM (SEQ ID NO: 13698):KPLS-AA¹⁷-LYV (SEQ ID NO: 13804), SIPKAXXAPVEL (SEQ ID NO: 13768):KPLS-AA¹⁷-LYV (SEQ ID NO: 13804), HVTKPTXAPVKL (SEQ ID NO: 13722):KPLS-AA¹⁷-LYV (SEQ ID NO: 13804), YVPKPXXAPVKL (SEQ ID NO: 13794):KPLS-AA¹⁷-LYV (SEQ ID NO: 13804), TVPKPXXAPVQL (SEQ ID NO: 13786):KPLS-AA¹⁷-LYV (SEQ ID NO: 13804), AVPKAXXAPVKL (SEQ ID NO: 13690):KPLS-AA¹⁷-LYV (SEQ ID NO: 13804), KVGKAXXAPVKL (SEQ ID NO: 13748):KPLS-AA¹⁷-LYV (SEQ ID NO: 13804), KASKAXXAPVKL (SEQ ID NO: 13732):KPLS-AA¹⁷-LYV (SEQ ID NO: 13804), GSAGPXXAPVKM (SEQ ID NO: 13706):KPLS-AA¹⁷-LYV (SEQ ID NO: 13804), AAPASXXAPVRL (SEQ ID NO: 13666):KPLS-AA¹⁷-LYV (SEQ ID NO: 13804), STPPTXXAPVRL (SEQ ID NO: 13778):KPLS-AA¹⁷-LYV (SEQ ID NO: 13804), HVPKPXXAPVKL (SEQ ID NO: 13714):KPLS-AA¹⁷-LYV (SEQ ID NO: 13804), ASAAPXXAPVAL (SEQ ID NO: 13674):KPLS-AA¹⁷-LYV (SEQ ID NO: 13804), ASASPXXAPVDL (SEQ ID NO: 13682):KPLS-AA¹⁷-LYV (SEQ ID NO: 13804), KIPKAXXVPTEL (SEQ ID NO: 13745):KPLS-AA¹⁷-LYV (SEQ ID NO: 13804), GIPEPXXVPEKM (SEQ ID NO: 13701):KPLS-AA¹⁷-LYV (SEQ ID NO: 13804), SIPKAXXVPTEL (SEQ ID NO: 13773):KPLS-AA¹⁷-LYV (SEQ ID NO: 13804), HVTKPTXAPTKL (SEQ ID NO: 13721):KPLS-AA¹⁷-LYV (SEQ ID NO: 13804), YVPKPXXAPTKL (SEQ ID NO: 13793):KPLS-AA¹⁷-LYV (SEQ ID NO: 13804), TVPKPXXAPTQL (SEQ ID NO: 13785):KPLS-AA¹⁷-LYV (SEQ ID NO: 13804), AVPKAXXAPTKL (SEQ ID NO: 13689):KPLS-AA¹⁷-LYV (SEQ ID NO: 13804), KVGKAXXVPTKL (SEQ ID NO: 13753):KPLS-AA¹⁷-LYV (SEQ ID NO: 13804), KASKAXXVPTKL (SEQ ID NO: 13737):KPLS-AA¹⁷-LYV (SEQ ID NO: 13804), GSAGPXXTPTKM (SEQ ID NO: 13707):KPLS-AA¹⁷-LYV (SEQ ID NO: 13804), AAPASXXVPARL (SEQ ID NO: 13668):KPLS-AA¹⁷-LYV (SEQ ID NO: 13804), STPPTXXVPTRL (SEQ ID NO: 13783):KPLS-AA¹⁷-LYV (SEQ ID NO: 13804), HVPKPXXAPTKL (SEQ ID NO: 13713):KPLS-AA¹⁷-LYV (SEQ ID NO: 13804), ASAAPXXVPQAL (SEQ ID NO: 13678):KPLS-AA¹⁷-LYV (SEQ ID NO: 13804), ASASPXXVSQDL (SEQ ID NO: 13688):KPLS-AA¹⁷-LYV (SEQ ID NO: 13804), ASASPXXVPQDL (SEQ ID NO: 13686):KPLS-AA¹⁷-LYV (SEQ ID NO: 13804), NDEGLEXVPTEE (SEQ ID NO: 13755):KPLS-AA¹⁷-LYV (SEQ ID NO: 13804), NDEGLEXVPTGQ (SEQ ID NO: 13756):KPLS-AA¹⁷-LYV (SEQ ID NO: 13804), SSVKXQPSRVHH (SEQ ID NO: 13775):KPLS-AA¹⁷-LYV (SEQ ID NO: 13804), RNVQXRPTQVQL (SEQ ID NO: 13758):KPLS-AA¹⁷-LYV (SEQ ID NO: 13804), KIPKAXXVPQEL (SEQ ID NO: 13744):EPLP-AA¹⁷-VYY (SEQ ID NO: 13802), GIPEPXXVPQKM (SEQ ID NO: 13702):EPLP-AA¹⁷-VYY (SEQ ID NO: 13802), SIPKAXXVPQEL (SEQ ID NO: 13772):EPLP-AA¹⁷-VYY (SEQ ID NO: 13802), HVTKPTXVPQKL (SEQ ID NO: 13728):EPLP-AA¹⁷-VYY (SEQ ID NO: 13802), YVPKPXXVPQKL (SEQ ID NO: 13798):EPLP-AA¹⁷-VYY (SEQ ID NO: 13802), TVPKPXXVPQQL (SEQ ID NO: 13790):EPLP-AA¹⁷-VYY (SEQ ID NO: 13802), AVPKAXXVPQKL (SEQ ID NO: 13694):EPLP-AA¹⁷-VYY (SEQ ID NO: 13802), KVGKAXXVPQKL (SEQ ID NO: 13752):EPLP-AA¹⁷-VYY (SEQ ID NO: 13802), KASKAXXVPQKL (SEQ ID NO: 13736):EPLP-AA¹⁷-VYY (SEQ ID NO: 13802), GSAGPXXVPQKM (SEQ ID NO: 13710):EPLP-AA¹⁷-VYY (SEQ ID NO: 13802), AAPASXXVPQRL (SEQ ID NO: 13670):EPLP-AA¹⁷-VYY (SEQ ID NO: 13802), STPPTXXVPQRL (SEQ ID NO: 13782):EPLP-AA¹⁷-VYY (SEQ ID NO: 13802), HVPKPXXVPQKL (SEQ ID NO: 13718):EPLP-AA¹⁷-VYY (SEQ ID NO: 13802), RVPSTXXVPQKT (SEQ ID NO: 13764):EPLP-AA¹⁷-VYY (SEQ ID NO: 13802), ASASPXXVPQDL (SEQ ID NO: 13686):EPLP-AA¹⁷-VYY (SEQ ID NO: 13802), KIPKAXXVPTEL (SEQ ID NO: 13745):EPLP-AA¹⁷-VYY (SEQ ID NO: 13802), GIPEPXXVPEKM (SEQ ID NO: 13701):EPLP-AA¹⁷-VYY (SEQ ID NO: 13802), SIPKAXXVPTEL (SEQ ID NO: 13773):EPLP-AA¹⁷-VYY (SEQ ID NO: 13802), HVTKPTXAPTKL (SEQ ID NO: 13721):EPLP-AA¹⁷-VYY (SEQ ID NO: 13802), YVPKPXXAPTKL (SEQ ID NO: 13793):EPLP-AA¹⁷-VYY (SEQ ID NO: 13802), TVPKPXXAPTQL (SEQ ID NO: 13785):EPLP-AA¹⁷-VYY (SEQ ID NO: 13802), AVPKAXXAPTKL (SEQ ID NO: 13689):EPLP-AA¹⁷-VYY (SEQ ID NO: 13802), KVGKAXXVPTKL (SEQ ID NO: 13753):EPLP-AA¹⁷-VYY (SEQ ID NO: 13802), KASKAXXVPTKL (SEQ ID NO: 13737):EPLP-AA¹⁷-VYY (SEQ ID NO: 13802), GSAGPXXTPTKM (SEQ ID NO: 13707):EPLP-AA¹⁷-VYY (SEQ ID NO: 13802), AAPASXXVPARL (SEQ ID NO: 13668):EPLP-AA¹⁷-VYY (SEQ ID NO: 13802), STPPTXXVPTRL (SEQ ID NO: 13783):EPLP-AA¹⁷-VYY (SEQ ID NO: 13802), HVPKPXXAPTKL (SEQ ID NO: 13713):EPLP-AA¹⁷-VYY (SEQ ID NO: 13802), RVPSTXXAPVKT (SEQ ID NO: 13760):EPLP-AA¹⁷-VYY (SEQ ID NO: 13802), ASASPXXVSQDL (SEQ ID NO: 13688):EPLP-AA¹⁷-VYY (SEQ ID NO: 13802), NDEGLEXVPTEE (SEQ ID NO: 13755):EPLP-AA¹⁷-VYY (SEQ ID NO: 13802), NDEGLEXVPTGQ (SEQ ID NO: 13756):EPLP-AA¹⁷-VYY (SEQ ID NO: 13802), SSVKXQPSRVHH (SEQ ID NO: 13775):EPLP-AA¹⁷-VYY (SEQ ID NO: 13802), RNVQXRPTQVQL (SEQ ID NO: 13758):EPLP-AA¹⁷-VYY (SEQ ID NO: 13802), KIPKAXXVSQEL (SEQ ID NO: 13746):EPLT-AA¹⁷-LYY (SEQ ID NO: 13803), GIPEPXXVSQKM (SEQ ID NO: 13704):EPLT-AA¹⁷-LYY (SEQ ID NO: 13803), SIPKAXXVSQEL (SEQ ID NO: 13774):EPLT-AA¹⁷-LYY (SEQ ID NO: 13803), HVTKPTXVSQKL (SEQ ID NO: 13730):EPLT-AA¹⁷-LYY (SEQ ID NO: 13803), YVPKPXXVSQKL (SEQ ID NO: 13800):EPLT-AA¹⁷-LYY (SEQ ID NO: 13803), TVPKPXXVSQQL (SEQ ID NO: 13792):EPLT-AA¹⁷-LYY (SEQ ID NO: 13803), AVPKAXXVSQKL (SEQ ID NO: 13696):EPLT-AA¹⁷-LYY (SEQ ID NO: 13803), KVGKAXXVSQKL (SEQ ID NO: 13754):EPLT-AA¹⁷-LYY (SEQ ID NO: 13803), KASKAXXVSQKL (SEQ ID NO: 13738):EPLT-AA¹⁷-LYY (SEQ ID NO: 13803), GSAGPXXVSQKM (SEQ ID NO: 13712):EPLT-AA¹⁷-LYY (SEQ ID NO: 13803), AAPASXXVSQRL (SEQ ID NO: 13672):EPLT-AA¹⁷-LYY (SEQ ID NO: 13803), STPPTXXVSQRL (SEQ ID NO: 13784):EPLT-AA¹⁷-LYY (SEQ ID NO: 13803), HVPKPXXVSQKL (SEQ ID NO: 13720):EPLT-AA¹⁷-LYY (SEQ ID NO: 13803), RVPSTXXVSQKT (SEQ ID NO: 13766):EPLT-AA¹⁷-LYY (SEQ ID NO: 13803), ASAAPXXVSQAL (SEQ ID NO: 13680):EPLT-AA¹⁷-LYY (SEQ ID NO: 13803), ASASPXXVSQDL (SEQ ID NO: 13688):EPLT-AA¹⁷-LYY (SEQ ID NO: 13803), KIPKAXXVPTEL (SEQ ID NO: 13745):EPLT-AA¹⁷-LYY (SEQ ID NO: 13803), GIPEPXXVPEKM (SEQ ID NO: 13701):EPLT-AA¹⁷-LYY (SEQ ID NO: 13803), SIPKAXXVPTEL (SEQ ID NO: 13773):EPLT-AA¹⁷-LYY (SEQ ID NO: 13803), HVTKPTXAPTKL (SEQ ID NO: 13721):EPLT-AA¹⁷-LYY (SEQ ID NO: 13803), YVPKPXXAPTKL (SEQ ID NO: 13793):EPLT-AA¹⁷-LYY (SEQ ID NO: 13803), TVPKPXXAPTQL (SEQ ID NO: 13785):EPLT-AA¹⁷-LYY (SEQ ID NO: 13803), AVPKAXXAPTKL (SEQ ID NO: 13689):EPLT-AA¹⁷-LYY (SEQ ID NO: 13803), KVGKAXXVPTKL (SEQ ID NO: 13753):EPLT-AA¹⁷-LYY (SEQ ID NO: 13803), KASKAXXVPTKL (SEQ ID NO: 13737):EPLT-AA¹⁷-LYY (SEQ ID NO: 13803), GSAGPXXTPTKM (SEQ ID NO: 13707):EPLT-AA¹⁷-LYY (SEQ ID NO: 13803), AAPASXXVPARL (SEQ ID NO: 13668):EPLT-AA¹⁷-LYY (SEQ ID NO: 13803), STPPTXXVPTRL (SEQ ID NO: 13783):EPLT-AA¹⁷-LYY (SEQ ID NO: 13803), HVPKPXXAPTKL (SEQ ID NO: 13713):EPLT-AA¹⁷-LYY (SEQ ID NO: 13803), RVPSTXXAPVKT (SEQ ID NO: 13760):EPLT-AA¹⁷-LYY (SEQ ID NO: 13803), ASAAPXXVPQAL (SEQ ID NO: 13678):EPLT-AA¹⁷-LYY (SEQ ID NO: 13803), NDEGLEXVPTEE (SEQ ID NO: 13755):EPLT-AA¹⁷-LYY (SEQ ID NO: 13803), NDEGLEXVPTGQ (SEQ ID NO: 13756):EPLT-AA¹⁷-LYY (SEQ ID NO: 13803), SSVKXQPSRVHH (SEQ ID NO: 13775):EPLT-AA¹⁷-LYY (SEQ ID NO: 13803), RNVQXRPTQVQL (SEQ ID NO: 13758):EPLT-AA¹⁷-LYY (SEQ ID NO: 13803), KIPKAXXVPQEL (SEQ ID NO: 13744):EPLT-AA¹⁷-LYY (SEQ ID NO: 13803), GIPEPXXVPQKM (SEQ ID NO: 13702):EPLT-AA¹⁷-LYY (SEQ ID NO: 13803), SIPKAXXVPQEL (SEQ ID NO: 13772):EPLT-AA¹⁷-LYY (SEQ ID NO: 13803), HVTKPTXVPQKL (SEQ ID NO: 13728):EPLT-AA¹⁷-LYY (SEQ ID NO: 13803), YVPKPXXVPQKL (SEQ ID NO: 13798):EPLT-AA¹⁷-LYY (SEQ ID NO: 13803), TVPKPXXVPQQL (SEQ ID NO: 13790):EPLT-AA¹⁷-LYY (SEQ ID NO: 13803), AVPKAXXVPQKL (SEQ ID NO: 13694):EPLT-AA¹⁷-LYY (SEQ ID NO: 13803), KVGKAXXVPQKL (SEQ ID NO: 13752):EPLT-AA¹⁷-LYY (SEQ ID NO: 13803), KASKAXXVPQKL (SEQ ID NO: 13736):EPLT-AA¹⁷-LYY (SEQ ID NO: 13803), GSAGPXXVPQKM (SEQ ID NO: 13710):EPLT-AA¹⁷-LYY (SEQ ID NO: 13803), AAPASXXVPQRL (SEQ ID NO: 13670):EPLT-AA¹⁷-LYY (SEQ ID NO: 13803), STPPTXXVPQRL (SEQ ID NO: 13782):EPLT-AA¹⁷-LYY (SEQ ID NO: 13803), HVPKPXXVPQKL (SEQ ID NO: 13718):EPLT-AA¹⁷-LYY (SEQ ID NO: 13803), RVPSTXXVPQKT (SEQ ID NO: 13764):EPLT-AA¹⁷-LYY (SEQ ID NO: 13803), ASASPXXVPQDL (SEQ ID NO: 13686):EPLT-AA¹⁷-LYY (SEQ ID NO: 13803), NDEGLEXVPTGQ (SEQ ID NO: 13756):SNIT-AA¹⁷-QIM (SEQ ID NO: 13810), GIPEPXXVPEKM (SEQ ID NO: 13701):SNIT-AA¹⁷-QIM (SEQ ID NO: 13810), HVTKPTXAPTKL (SEQ ID NO: 13721):SNIT-AA¹⁷-QIM (SEQ ID NO: 13810), YVPKPXXAPTKL (SEQ ID NO: 13793):SNIT-AA¹⁷-QIM (SEQ ID NO: 13810), TVPKPXXAPTQL (SEQ ID NO: 13785):SNIT-AA¹⁷-QIM (SEQ ID NO: 13810), AVPKAXXAPTKL (SEQ ID NO: 13689):SNIT-AA¹⁷-QIM (SEQ ID NO: 13810), GSAGPXXTPTKM (SEQ ID NO: 13707):SNIT-AA¹⁷-QIM (SEQ ID NO: 13810), AAPASXXVPARL (SEQ ID NO: 13668):SNIT-AA¹⁷-QIM (SEQ ID NO: 13810), HVPKPXXAPTKL (SEQ ID NO: 13713):SNIT-AA¹⁷-QIM (SEQ ID NO: 13810), RVPSTXXAPVKT (SEQ ID NO: 13760):SNIT-AA¹⁷-QIM (SEQ ID NO: 13810), ASAAPXXVPQAL (SEQ ID NO: 13678):SNIT-AA¹⁷-QIM (SEQ ID NO: 13810), ASASPXXVSQDL (SEQ ID NO: 13688):SNIT-AA¹⁷-QIM (SEQ ID NO: 13810), ASASPXXVPQDL (SEQ ID NO: 13686):SNIT-AA¹⁷-QIM (SEQ ID NO: 13810), SSVKXQPSRVHH (SEQ ID NO: 13775):SNIT-AA¹⁷-QIM (SEQ ID NO: 13810), RNVQXRPTQVQL (SEQ ID NO: 13758):SNIT-AA¹⁷-QIM (SEQ ID NO: 13810), RNVQXRPSRVQL (SEQ ID NO: 13757):RSVK-AA¹⁷-AKV (SEQ ID NO: 13807), KIPKAXXVPTEL (SEQ ID NO: 13745):RSVK-AA¹⁷-AKV (SEQ ID NO: 13807), GIPEPXXVPEKM (SEQ ID NO: 13701):RSVK-AA¹⁷-AKV (SEQ ID NO: 13807), SIPKAXXVPTEL (SEQ ID NO: 13773):RSVK-AA¹⁷-AKV (SEQ ID NO: 13807), HVTKPTXAPTKL (SEQ ID NO: 13721):RSVK-AA¹⁷-AKV (SEQ ID NO: 13807), YVPKPXXAPTKL (SEQ ID NO: 13793):RSVK-AA¹⁷-AKV (SEQ ID NO: 13807), TVPKPXXAPTQL (SEQ ID NO: 13785):RSVK-AA¹⁷-AKV (SEQ ID NO: 13807), AVPKAXXAPTKL (SEQ ID NO: 13689):RSVK-AA¹⁷-AKV (SEQ ID NO: 13807), KVGKAXXVPTKL (SEQ ID NO: 13753):RSVK-AA¹⁷-AKV (SEQ ID NO: 13807), KASKAXXVPTKL (SEQ ID NO: 13737):RSVK-AA¹⁷-AKV (SEQ ID NO: 13807), GSAGPXXTPTKM (SEQ ID NO: 13707):RSVK-AA¹⁷-AKV (SEQ ID NO: 13807), AAPASXXVPARL (SEQ ID NO: 13668):RSVK-AA¹⁷-AKV (SEQ ID NO: 13807), STPPTXXVPTRL (SEQ ID NO: 13783):RSVK-AA¹⁷-AKV (SEQ ID NO: 13807), HVPKPXXAPTKL (SEQ ID NO: 13713):RSVK-AA¹⁷-AKV (SEQ ID NO: 13807), RVPSTXXAPVKT (SEQ ID NO: 13760):RSVK-AA¹⁷-AKV (SEQ ID NO: 13807), ASAAPXXVPQAL (SEQ ID NO: 13678):RSVK-AA¹⁷-AKV (SEQ ID NO: 13807), ASASPXXVSQDL (SEQ ID NO: 13688):RSVK-AA¹⁷-AKV (SEQ ID NO: 13807), ASASPXXVPQDL (SEQ ID NO: 13686):RSVK-AA¹⁷-AKV (SEQ ID NO: 13807), NDEGLEXVPTEE (SEQ ID NO: 13755):RSVK-AA¹⁷-AKV (SEQ ID NO: 13807), NDEGLEXVPTGQ (SEQ ID NO: 13756):RSVK-AA¹⁷-AKV (SEQ ID NO: 13807), RNVQXRPTQVQL (SEQ ID NO: 13758):RSVK-AA¹⁷-AKV (SEQ ID NO: 13807), SSVKXQPTQVHH (SEQ ID NO: 13776):RPVQ-AA¹⁷-RKI (SEQ ID NO: 13806), KIPKAXXVPTEL (SEQ ID NO: 13745):RPVQ-AA¹⁷-RKI (SEQ ID NO: 13806), GIPEPXXVPEKM (SEQ ID NO: 13701):RPVQ-AA¹⁷-RKI (SEQ ID NO: 13806), SIPKAXXVPTEL (SEQ ID NO: 13773):RPVQ-AA¹⁷-RKI (SEQ ID NO: 13806), HVTKPTXAPTKL (SEQ ID NO: 13721):RPVQ-AA¹⁷-RKI (SEQ ID NO: 13806), YVPKPXXAPTKL (SEQ ID NO: 13793):RPVQ-AA¹⁷-RKI (SEQ ID NO: 13806), TVPKPXXAPTQL (SEQ ID NO: 13785):RPVQ-AA¹⁷-RKI (SEQ ID NO: 13806), AVPKAXXAPTKL (SEQ ID NO: 13689):RPVQ-AA¹⁷-RKI (SEQ ID NO: 13806), KVGKAXXVPTKL (SEQ ID NO: 13753):RPVQ-AA¹⁷-RKI (SEQ ID NO: 13806), KASKAXXVPTKL (SEQ ID NO: 13737):RPVQ-AA¹⁷-RKI (SEQ ID NO: 13806), GSAGPXXTPTKM (SEQ ID NO: 13707):RPVQ-AA¹⁷-RKI (SEQ ID NO: 13806), AAPASXXVPARL (SEQ ID NO: 13668):RPVQ-AA¹⁷-RKI (SEQ ID NO: 13806), STPPTXXVPTRL (SEQ ID NO: 13783):RPVQ-AA¹⁷-RKI (SEQ ID NO: 13806), HVPKPXXAPTKL (SEQ ID NO: 13713):RPVQ-AA¹⁷-RKI (SEQ ID NO: 13806), RVPSTXXAPVKT (SEQ ID NO: 13760):RPVQ-AA¹⁷-RKI (SEQ ID NO: 13806), ASAAPXXVPQAL (SEQ ID NO: 13678):RPVQ-AA¹⁷-RKI (SEQ ID NO: 13806), ASASPXXVSQDL (SEQ ID NO: 13688):RPVQ-AA¹⁷-RKI (SEQ ID NO: 13806), ASASPXXVPQDL (SEQ ID NO: 13686):RPVQ-AA¹⁷-RKI (SEQ ID NO: 13806), NDEGLEXVPTEE (SEQ ID NO: 13755):RPVQ-AA¹⁷-RKI (SEQ ID NO: 13806), NDEGLEXVPTGQ (SEQ ID NO: 13756):RPVQ-AA¹⁷-RKI (SEQ ID NO: 13806) and SSVKXQPSRVHH (SEQ ID NO: 13775):RPVQ-AA¹⁷-RKI (SEQ ID NO: 13806); and wherein AA¹⁷ is selected from the group consisting of G, A, V, L, I, P, F, M, W, T and S (in particular is selected from the group consisting of M, I, L, V and T).

[0309] In certain embodiments, the triplet PEP7:PEP3:PEP1 is selected from the group consisting of GIPEPXX (SEQ ID NO: 13650):VPT:SAIS (SEQ ID NO: 13570), HVTKPTX (SEQ ID NO: 13653):VPT:SAIS (SEQ ID NO: 13570), YVPKPXX (SEQ ID NO: 13664):VPT:SAIS (SEQ ID NO: 13570), TVPKPXX (SEQ ID NO: 13663):VPT:SAIS (SEQ ID NO: 13570), AVPKAXX (SEQ ID NO: 13649):VPT:SAIS (SEQ ID NO: 13570), KVGKAXX (SEQ ID NO: 13656):VPT:SAIS (SEQ ID NO: 13570), KASKAXX (SEQ ID NO: 13654):VPT:SAIS (SEQ ID NO: 13570), GSAGPXX (SEQ ID NO: 13651):VPT:SAIS (SEQ ID NO: 13570), AAPASXX (SEQ ID NO: 13646):VPT:SAIS (SEQ ID NO: 13570), STPPTXX (SEQ ID NO: 13662):VPT:SAIS (SEQ ID NO: 13570), HVPKPXX (SEQ ID NO: 13652):VPT:SAIS (SEQ ID NO: 13570), RVPSTXX (SEQ ID NO: 13659):VPT:SAIS (SEQ ID NO: 13570), ASAAPXX (SEQ ID NO: 13647):VPT:SAIS (SEQ ID NO: 13570), ASASPXX (SEQ ID NO: 13648):VPT:SAIS (SEQ ID NO: 13570), GIPEPXX (SEQ ID NO: 13650):VPE:SAIS (SEQ ID NO: 13570), HVTKPTX (SEQ ID NO: 13653):APT:SAIS (SEQ ID NO: 13570), YVPKPXX (SEQ ID NO: 13664):APT:SAIS (SEQ ID NO: 13570), TVPKPXX (SEQ ID NO: 13663):APT:SAIS (SEQ ID NO: 13570), AVPKAXX (SEQ ID NO: 13649):APT:SAIS (SEQ ID NO: 13570), GSAGPXX (SEQ ID NO: 13651):TPT:SAIS (SEQ ID NO: 13570), AAPASXX (SEQ ID NO: 13646):VPA:SAIS (SEQ ID NO: 13570), HVPKPXX (SEQ ID NO: 13652):APT:SAIS (SEQ ID NO: 13570), RVPSTXX (SEQ ID NO: 13659):APV:SAIS (SEQ ID NO: 13570), ASAAPXX (SEQ ID NO: 13647):VPQ:SAIS (SEQ ID NO: 13570), ASASPXX (SEQ ID NO: 13648):VSQ:SAIS (SEQ ID NO: 13570), ASASPXX (SEQ ID NO: 13648):VPQ:SAIS (SEQ ID NO: 13570), SSVKXQP (SEQ ID NO: 13661):SRV:SAIS (SEQ ID NO: 13570), RNVQXRP (SEQ ID NO: 13658):TQV:SAIS (SEQ ID NO: 13570), KIPKAXX (SEQ ID NO: 13655):VPE:SSLS (SEQ ID NO: 13575), SIPKAXX (SEQ ID NO: 13660):VPE:SSLS (SEQ ID NO: 13575), HVTKPTX (SEQ ID NO: 13653):VPE:SSLS (SEQ ID NO: 13575), YVPKPXX (SEQ ID NO: 13664):VPE:SSLS (SEQ ID NO: 13575), TVPKPXX (SEQ ID NO: 13663):VPE:SSLS (SEQ ID NO: 13575), AVPKAXX (SEQ ID NO: 13649):VPE:SSLS (SEQ ID NO: 13575), KVGKAXX (SEQ ID NO: 13656):VPE:SSLS (SEQ ID NO: 13575), KASKAXX (SEQ ID NO: 13654):VPE:SSLS (SEQ ID NO: 13575), GSAGPXX (SEQ ID NO: 13651):VPE:SSLS (SEQ ID NO: 13575), AAPASXX (SEQ ID NO: 13646):VPE:SSLS (SEQ ID NO: 13575), STPPTXX (SEQ ID NO: 13662):VPE:SSLS (SEQ ID NO: 13575), HVPKPXX (SEQ ID NO: 13652):VPE:SSLS (SEQ ID NO: 13575), RVPSTXX (SEQ ID NO: 13659):VPE:SSLS (SEQ ID NO: 13575), ASAAPXX (SEQ ID NO: 13647):VPE:SSLS (SEQ ID NO: 13575), ASASPXX (SEQ ID NO: 13648):VPE:SSLS (SEQ ID NO: 13575), KIPKAXX (SEQ ID NO: 13655):VPT:SSLS (SEQ ID NO: 13575), SIPKAXX (SEQ ID NO: 13660):VPT:SSLS (SEQ ID NO: 13575), HVTKPTX (SEQ ID NO: 13653):APT:SSLS (SEQ ID NO: 13575), YVPKPXX (SEQ ID NO: 13664):APT:SSLS (SEQ ID NO: 13575), TVPKPXX (SEQ ID NO: 13663):APT:SSLS (SEQ ID NO: 13575), AVPKAXX (SEQ ID NO: 13649):APT:SSLS (SEQ ID NO: 13575), KVGKAXX (SEQ ID NO: 13656):VPT:SSLS (SEQ ID NO: 13575), KASKAXX (SEQ ID NO: 13654):VPT:SSLS (SEQ ID NO: 13575), GSAGPXX (SEQ ID NO: 13651):TPT:SSLS (SEQ ID NO: 13575), AAPASXX (SEQ ID NO: 13646):VPA:SSLS (SEQ ID NO: 13575), STPPTXX (SEQ ID NO: 13662):VPT:SSLS (SEQ ID NO: 13575), HVPKPXX (SEQ ID NO: 13652):APT:SSLS (SEQ ID NO: 13575), RVPSTXX (SEQ ID NO: 13659):APV:SSLS (SEQ ID NO: 13575), ASAAPXX (SEQ ID NO: 13647):VPQ:SSLS (SEQ ID NO: 13575), ASASPXX (SEQ ID NO: 13648):VSQ:SSLS (SEQ ID NO: 13575), ASASPXX (SEQ ID NO: 13648):VPQ:SSLS (SEQ ID NO: 13575), NDEGLEX (SEQ ID NO: 13657):VPT:SSLS (SEQ ID NO: 13575), SSVKXQP (SEQ ID NO: 13661):SRV:SSLS (SEQ ID NO: 13575), RNVQXRP (SEQ ID NO: 13658):TQV:SSLS (SEQ ID NO: 13575), KIPKAXX (SEQ ID NO: 13655):APT:NAIS (SEQ ID NO: 13567), GIPEPXX (SEQ ID NO: 13650):APT:NAIS (SEQ ID NO: 13567), SIPKAXX (SEQ ID NO: 13660):APT:NAIS (SEQ ID NO: 13567), AVPKAXX (SEQ ID NO: 13649):APT:NAIS (SEQ ID NO: 13567), KVGKAXX (SEQ ID NO: 13656):APT:NAIS (SEQ ID NO: 13567), KASKAXX (SEQ ID NO: 13654):APT:NAIS (SEQ ID NO: 13567), GSAGPXX (SEQ ID NO: 13651):APT:NAIS (SEQ ID NO: 13567), AAPASXX (SEQ ID NO: 13646):APT:NAIS (SEQ ID NO: 13567), STPPTXX (SEQ ID NO: 13662):APT:NAIS (SEQ ID NO: 13567), RVPSTXX (SEQ ID NO: 13659):APT:NAIS (SEQ ID NO: 13567), ASAAPXX (SEQ ID NO: 13647):APT:NAIS (SEQ ID NO: 13567), ASASPXX (SEQ ID NO: 13648):APT:NAIS (SEQ ID NO: 13567), KIPKAXX (SEQ ID NO: 13655):VPT:NAIS (SEQ ID NO: 13567), GIPEPXX (SEQ ID NO: 13650):VPE:NAIS (SEQ ID NO: 13567), SIPKAXX (SEQ ID NO: 13660):VPT:NAIS (SEQ ID NO: 13567), KVGKAXX (SEQ ID NO: 13656):VPT:NAIS (SEQ ID NO: 13567), KASKAXX (SEQ ID NO: 13654):VPT:NAIS (SEQ ID NO: 13567), GSAGPXX (SEQ ID NO: 13651):TPT:NAIS (SEQ ID NO: 13567), AAPASXX (SEQ ID NO: 13646):VPA:NAIS (SEQ ID NO: 13567), STPPTXX (SEQ ID NO: 13662):VPT:NAIS (SEQ ID NO: 13567), RVPSTXX (SEQ ID NO: 13659):APV:NAIS (SEQ ID NO: 13567), ASAAPXX (SEQ ID NO: 13647):VPQ:NAIS (SEQ ID NO: 13567), ASASPXX (SEQ ID NO: 13648):VSQ:NAIS (SEQ ID NO: 13567), ASASPXX (SEQ ID NO: 13648):VPQ:NAIS (SEQ ID NO: 13567), NDEGLEX (SEQ ID NO: 13657):VPT:NAIS (SEQ ID NO: 13567), SSVKXQP (SEQ ID NO: 13661):SRV:NAIS (SEQ ID NO: 13567), RNVQXRP (SEQ ID NO: 13658):TQV:NAIS (SEQ ID NO: 13567), KIPKAXX (SEQ ID NO: 13655):APT:SATS (SEQ ID NO: 13571), GIPEPXX (SEQ ID NO: 13650):APT:SATS (SEQ ID NO: 13571), SIPKAXX (SEQ ID NO: 13660):APT:SATS (SEQ ID NO: 13571), HVTKPTX (SEQ ID NO: 13653):APT:SATS (SEQ ID NO: 13571), YVPKPXX (SEQ ID NO: 13664):APT:SATS (SEQ ID NO: 13571), TVPKPXX (SEQ ID NO: 13663):APT:SATS (SEQ ID NO: 13571), KVGKAXX (SEQ ID NO: 13656):APT:SATS (SEQ ID NO: 13571), KASKAXX (SEQ ID NO: 13654):APT:SATS (SEQ ID NO: 13571), GSAGPXX (SEQ ID NO: 13651):APT:SATS (SEQ ID NO: 13571), AAPASXX (SEQ ID NO: 13646):APT:SATS (SEQ ID NO: 13571), STPPTXX (SEQ ID NO: 13662):APT:SATS (SEQ ID NO: 13571), HVPKPXX (SEQ ID NO: 13652):APT:SATS (SEQ ID NO: 13571), RVPSTXX (SEQ ID NO: 13659):APT:SATS (SEQ ID NO: 13571), ASAAPXX (SEQ ID NO: 13647):APT:SATS (SEQ ID NO: 13571), ASASPXX (SEQ ID NO: 13648):APT:SATS (SEQ ID NO: 13571), KIPKAXX (SEQ ID NO: 13655):VPT:SATS (SEQ ID NO: 13571), GIPEPXX (SEQ ID NO: 13650):VPE:SATS (SEQ ID NO: 13571), SIPKAXX (SEQ ID NO: 13660):VPT:SATS (SEQ ID NO: 13571), KVGKAXX (SEQ ID NO: 13656):VPT:SATS (SEQ ID NO: 13571), KASKAXX (SEQ ID NO: 13654):VPT:SATS (SEQ ID NO: 13571), GSAGPXX (SEQ ID NO: 13651):TPT:SATS (SEQ ID NO: 13571), AAPASXX (SEQ ID NO: 13646):VPA:SATS (SEQ ID NO: 13571), STPPTXX (SEQ ID NO: 13662):VPT:SATS (SEQ ID NO: 13571), RVPSTXX (SEQ ID NO: 13659):APV:SATS (SEQ ID NO: 13571), ASAAPXX (SEQ ID NO: 13647):VPQ:SATS (SEQ ID NO: 13571), ASASPXX (SEQ ID NO: 13648):VSQ:SATS (SEQ ID NO: 13571), ASASPXX (SEQ ID NO: 13648):VPQ:SATS (SEQ ID NO: 13571), NDEGLEX (SEQ ID NO: 13657):VPT:SATS (SEQ ID NO: 13571), SSVKXQP (SEQ ID NO: 13661):SRV:SATS (SEQ ID NO: 13571), RNVQXRP (SEQ ID NO: 13658):TQV:SATS (SEQ ID NO: 13571), KIPKAXX (SEQ ID NO: 13655):VPT:SPIS (SEQ ID NO: 13574), GIPEPXX (SEQ ID NO: 13650):VPT:SPIS (SEQ ID NO: 13574), SIPKAXX (SEQ ID NO: 13660):VPT:SPIS (SEQ ID NO: 13574), HVTKPTX (SEQ ID NO: 13653):VPT:SPIS (SEQ ID NO: 13574), YVPKPXX (SEQ ID NO: 13664):VPT:SPIS (SEQ ID NO: 13574), TVPKPXX (SEQ ID NO: 13663):VPT:SPIS (SEQ ID NO: 13574), AVPKAXX (SEQ ID NO: 13649):VPT:SPIS (SEQ ID NO: 13574), KASKAXX (SEQ ID NO: 13654):VPT:SPIS (SEQ ID NO: 13574), GSAGPXX (SEQ ID NO: 13651):VPT:SPIS (SEQ ID NO: 13574), AAPASXX (SEQ ID NO: 13646):VPT:SPIS (SEQ ID NO: 13574), STPPTXX (SEQ ID NO: 13662):VPT:SPIS (SEQ ID NO: 13574), HVPKPXX (SEQ ID NO: 13652):VPT:SPIS (SEQ ID NO: 13574), RVPSTXX (SEQ ID NO: 13659):VPT:SPIS (SEQ ID NO: 13574), ASAAPXX (SEQ ID NO: 13647):VPT:SPIS (SEQ ID NO: 13574), ASASPXX (SEQ ID NO: 13648):VPT:SPIS (SEQ ID NO: 13574), GIPEPXX (SEQ ID NO: 13650):VPE:SPIS (SEQ ID NO: 13574), HVTKPTX (SEQ ID NO: 13653):APT:SPIS (SEQ ID NO: 13574), YVPKPXX (SEQ ID NO: 13664):APT:SPIS (SEQ ID NO: 13574), TVPKPXX (SEQ ID NO: 13663):APT:SPIS (SEQ ID NO: 13574), AVPKAXX (SEQ ID NO: 13649):APT:SPIS (SEQ ID NO: 13574), GSAGPXX (SEQ ID NO: 13651):TPT:SPIS (SEQ ID NO: 13574), AAPASXX (SEQ ID NO: 13646):VPA:SPIS (SEQ ID NO: 13574), HVPKPXX (SEQ ID NO: 13652):APT:SPIS (SEQ ID NO: 13574), RVPSTXX (SEQ ID NO: 13659):APV:SPIS (SEQ ID NO: 13574), ASAAPXX (SEQ ID NO: 13647):VPQ:SPIS (SEQ ID NO: 13574), ASASPXX (SEQ ID NO: 13648):VSQ:SPIS (SEQ ID NO: 13574), ASASPXX (SEQ ID NO: 13648):VPQ:SPIS (SEQ ID NO: 13574), SSVKXQP (SEQ ID NO: 13661):SRV:SPIS (SEQ ID NO: 13574), RNVQXRP (SEQ ID NO: 13658):TQV:SPIS (SEQ ID NO: 13574), KIPKAXX (SEQ ID NO: 13655):VPT:EPIS (SEQ ID NO: 13563), GIPEPXX (SEQ ID NO: 13650):VPT:EPIS (SEQ ID NO: 13563), SIPKAXX (SEQ ID NO: 13660):VPT:EPIS (SEQ ID NO: 13563), HVTKPTX (SEQ ID NO: 13653):VPT:EPIS (SEQ ID NO: 13563), YVPKPXX (SEQ ID NO: 13664):VPT:EPIS (SEQ ID NO: 13563), TVPKPXX (SEQ ID NO: 13663):VPT:EPIS (SEQ ID NO: 13563), AVPKAXX (SEQ ID NO: 13649):VPT:EPIS (SEQ ID NO: 13563), KVGKAXX (SEQ ID NO: 13656):VPT:EPIS (SEQ ID NO: 13563), GSAGPXX (SEQ ID NO: 13651):VPT:EPIS (SEQ ID NO: 13563), AAPASXX (SEQ ID NO: 13646):VPT:EPIS (SEQ ID NO: 13563), STPPTXX (SEQ ID NO: 13662):VPT:EPIS (SEQ ID NO: 13563), HVPKPXX (SEQ ID NO: 13652):VPT:EPIS (SEQ ID NO: 13563), RVPSTXX (SEQ ID NO: 13659):VPT:EPIS (SEQ ID NO: 13563), ASAAPXX (SEQ ID NO: 13647):VPT:EPIS (SEQ ID NO: 13563), ASASPXX (SEQ ID NO: 13648):VPT:EPIS (SEQ ID NO: 13563), GIPEPXX (SEQ ID NO: 13650):VPE:EPIS (SEQ ID NO: 13563), HVTKPTX (SEQ ID NO: 13653):APT:EPIS (SEQ ID NO: 13563), YVPKPXX (SEQ ID NO: 13664):APT:EPIS (SEQ ID NO: 13563), TVPKPXX (SEQ ID NO: 13663):APT:EPIS (SEQ ID NO: 13563), AVPKAXX (SEQ ID NO: 13649):APT:EPIS (SEQ ID NO: 13563), GSAGPXX (SEQ ID NO: 13651):TPT:EPIS (SEQ ID NO: 13563), AAPASXX (SEQ ID NO: 13646):VPA:EPIS (SEQ ID NO: 13563), HVPKPXX (SEQ ID NO: 13652):APT:EPIS (SEQ ID NO: 13563), RVPSTXX (SEQ ID NO: 13659):APV:EPIS (SEQ ID NO: 13563), ASAAPXX (SEQ ID NO: 13647):VPQ:EPIS (SEQ ID NO: 13563), ASASPXX (SEQ ID NO: 13648):VSQ:EPIS (SEQ ID NO: 13563), ASASPXX (SEQ ID NO: 13648):VPQ:EPIS (SEQ ID NO: 13563), SSVKXQP (SEQ ID NO: 13661):SRV:EPIS (SEQ ID NO: 13563), RNVQXRP (SEQ ID NO: 13658):TQV:EPIS (SEQ ID NO: 13563), KIPKAXX (SEQ ID NO: 13655):TPT:SPIN (SEQ ID NO: 13573), GIPEPXX (SEQ ID NO: 13650):TPT:SPIN (SEQ ID NO: 13573), SIPKAXX (SEQ ID NO: 13660):TPT:SPIN (SEQ ID NO: 13573), HVTKPTX (SEQ ID NO: 13653):TPT:SPIN (SEQ ID NO: 13573), YVPKPXX (SEQ ID NO: 13664):TPT:SPIN (SEQ ID NO: 13573), TVPKPXX (SEQ ID NO: 13663):TPT:SPIN (SEQ ID NO: 13573), AVPKAXX (SEQ ID NO: 13649):TPT:SPIN (SEQ ID NO: 13573), KVGKAXX (SEQ ID NO: 13656):TPT:SPIN (SEQ ID NO: 13573), KASKAXX (SEQ ID NO: 13654):TPT:SPIN (SEQ ID NO: 13573), AAPASXX (SEQ ID NO: 13646):TPT:SPIN (SEQ ID NO: 13573), STPPTXX (SEQ ID NO: 13662):TPT:SPIN (SEQ ID NO: 13573), HVPKPXX (SEQ ID NO: 13652):TPT:SPIN (SEQ ID NO: 13573), RVPSTXX (SEQ ID NO: 13659):TPT:SPIN (SEQ ID NO: 13573), ASAAPXX (SEQ ID NO: 13647):TPT:SPIN (SEQ ID NO: 13573), ASASPXX (SEQ ID NO: 13648):TPT:SPIN (SEQ ID NO: 13573), KIPKAXX (SEQ ID NO: 13655):VPT:SPIN (SEQ ID NO: 13573), GIPEPXX (SEQ ID NO: 13650):VPE:SPIN (SEQ ID NO: 13573), SIPKAXX (SEQ ID NO: 13660):VPT:SPIN (SEQ ID NO: 13573), HVTKPTX (SEQ ID NO: 13653):APT:SPIN (SEQ ID NO: 13573), YVPKPXX (SEQ ID NO: 13664):APT:SPIN (SEQ ID NO: 13573), TVPKPXX (SEQ ID NO: 13663):APT:SPIN (SEQ ID NO: 13573), AVPKAXX (SEQ ID NO: 13649):APT:SPIN (SEQ ID NO: 13573), KVGKAXX (SEQ ID NO: 13656):VPT:SPIN (SEQ ID NO: 13573), KASKAXX (SEQ ID NO: 13654):VPT:SPIN (SEQ ID NO: 13573), AAPASXX (SEQ ID NO: 13646):VPA:SPIN (SEQ ID NO: 13573), STPPTXX (SEQ ID NO: 13662):VPT:SPIN (SEQ ID NO: 13573), HVPKPXX (SEQ ID NO: 13652):APT:SPIN (SEQ ID NO: 13573), RVPSTXX (SEQ ID NO: 13659):APV:SPIN (SEQ ID NO: 13573), ASAAPXX (SEQ ID NO: 13647):VPQ:SPIN (SEQ ID NO: 13573), ASASPXX (SEQ ID NO: 13648):VSQ:SPIN (SEQ ID NO: 13573), ASASPXX (SEQ ID NO: 13648):VPQ:SPIN (SEQ ID NO: 13573), NDEGLEX (SEQ ID NO: 13657):VPT:SPIN (SEQ ID NO: 13573), SSVKXQP (SEQ ID NO: 13661):SRV:SPIN (SEQ ID NO: 13573), RNVQXRP (SEQ ID NO: 13658):TQV:SPIN (SEQ ID NO: 13573), KIPKAXX (SEQ ID NO: 13655):VPA:SPIS (SEQ ID NO: 13574), GIPEPXX (SEQ ID NO: 13650):VPA:SPIS (SEQ ID NO: 13574), SIPKAXX (SEQ ID NO: 13660):VPA:SPIS (SEQ ID NO: 13574), HVTKPTX (SEQ ID NO: 13653):VPA:SPIS (SEQ ID NO: 13574), YVPKPXX (SEQ ID NO: 13664):VPA:SPIS (SEQ ID NO: 13574), TVPKPXX (SEQ ID NO: 13663):VPA:SPIS (SEQ ID NO: 13574), AVPKAXX (SEQ ID NO: 13649):VPA:SPIS (SEQ ID NO: 13574), KVGKAXX (SEQ ID NO: 13656):VPA:SPIS (SEQ ID NO: 13574), KASKAXX (SEQ ID NO: 13654):VPA:SPIS (SEQ ID NO: 13574), GSAGPXX (SEQ ID NO: 13651):VPA:SPIS (SEQ ID NO: 13574), STPPTXX (SEQ ID NO: 13662):VPA:SPIS (SEQ ID NO: 13574), HVPKPXX (SEQ ID NO: 13652):VPA:SPIS (SEQ ID NO: 13574), RVPSTXX (SEQ ID NO: 13659):VPA:SPIS (SEQ ID NO: 13574), ASAAPXX (SEQ ID NO: 13647):VPA:SPIS (SEQ ID NO: 13574), ASASPXX (SEQ ID NO: 13648):VPA:SPIS (SEQ ID NO: 13574), KVGKAXX (SEQ ID NO: 13656):VPT:SPIS (SEQ ID NO: 13574), NDEGLEX (SEQ ID NO: 13657):VPT:SPIS (SEQ ID NO: 13574), KIPKAXX (SEQ ID NO: 13655):APV:KPLS (SEQ ID NO: 13566), GIPEPXX (SEQ ID NO: 13650):APV:KPLS (SEQ ID NO: 13566), SIPKAXX (SEQ ID NO: 13660):APV:KPLS (SEQ ID NO: 13566), HVTKPTX (SEQ ID NO: 13653):APV:KPLS (SEQ ID NO: 13566), YVPKPXX (SEQ ID NO: 13664):APV:KPLS (SEQ ID NO: 13566), TVPKPXX (SEQ ID NO: 13663):APV:KPLS (SEQ ID NO: 13566), AVPKAXX (SEQ ID NO: 13649):APV:KPLS (SEQ ID NO: 13566), KVGKAXX (SEQ ID NO: 13656):APV:KPLS (SEQ ID NO: 13566), KASKAXX (SEQ ID NO: 13654):APV:KPLS (SEQ ID NO: 13566), GSAGPXX (SEQ ID NO: 13651):APV:KPLS (SEQ ID NO: 13566), AAPASXX (SEQ ID NO: 13646):APV:KPLS (SEQ ID NO: 13566), STPPTXX (SEQ ID NO: 13662):APV:KPLS (SEQ ID NO: 13566), HVPKPXX (SEQ ID NO: 13652):APV:KPLS (SEQ ID NO: 13566), ASAAPXX (SEQ ID NO: 13647):APV:KPLS (SEQ ID NO: 13566), ASASPXX (SEQ ID NO: 13648):APV:KPLS (SEQ ID NO: 13566), KIPKAXX (SEQ ID NO: 13655):VPT:KPLS (SEQ ID NO: 13566), GIPEPXX (SEQ ID NO: 13650):VPE:KPLS (SEQ ID NO: 13566), SIPKAXX (SEQ ID NO: 13660):VPT:KPLS (SEQ ID NO: 13566), HVTKPTX (SEQ ID NO: 13653):APT:KPLS (SEQ ID NO: 13566), YVPKPXX (SEQ ID NO: 13664):APT:KPLS (SEQ ID NO: 13566), TVPKPXX (SEQ ID NO: 13663):APT:KPLS (SEQ ID NO: 13566), AVPKAXX (SEQ ID NO: 13649):APT:KPLS (SEQ ID NO: 13566), KVGKAXX (SEQ ID NO: 13656):VPT:KPLS (SEQ ID NO: 13566), KASKAXX (SEQ ID NO: 13654):VPT:KPLS (SEQ ID NO: 13566), GSAGPXX (SEQ ID NO: 13651):TPT:KPLS (SEQ ID NO: 13566), AAPASXX (SEQ ID NO: 13646):VPA:KPLS (SEQ ID NO: 13566), STPPTXX (SEQ ID NO: 13662):VPT:KPLS (SEQ ID NO: 13566), HVPKPXX (SEQ ID NO: 13652):APT:KPLS (SEQ ID NO: 13566), ASAAPXX (SEQ ID NO: 13647):VPQ:KPLS (SEQ ID NO: 13566), ASASPXX (SEQ ID NO: 13648):VSQ:KPLS (SEQ ID NO: 13566), ASASPXX (SEQ ID NO: 13648):VPQ:KPLS (SEQ ID NO: 13566), NDEGLEX (SEQ ID NO: 13657):VPT:KPLS (SEQ ID NO: 13566), SSVKXQP (SEQ ID NO: 13661):SRV:KPLS (SEQ ID NO: 13566), RNVQXRP (SEQ ID NO: 13658):TQV:KPLS (SEQ ID NO: 13566), KIPKAXX (SEQ ID NO: 13655):VPQ:EPLP (SEQ ID NO: 13564), GIPEPXX (SEQ ID NO: 13650):VPQ:EPLP (SEQ ID NO: 13564), SIPKAXX (SEQ ID NO: 13660):VPQ:EPLP (SEQ ID NO: 13564), HVTKPTX (SEQ ID NO: 13653):VPQ:EPLP (SEQ ID NO: 13564), YVPKPXX (SEQ ID NO: 13664):VPQ:EPLP (SEQ ID NO: 13564), TVPKPXX (SEQ ID NO: 13663):VPQ:EPLP (SEQ ID NO: 13564), AVPKAXX (SEQ ID NO: 13649):VPQ:EPLP (SEQ ID NO: 13564), KVGKAXX (SEQ ID NO: 13656):VPQ:EPLP (SEQ ID NO: 13564), KASKAXX (SEQ ID NO: 13654):VPQ:EPLP (SEQ ID NO: 13564), GSAGPXX (SEQ ID NO: 13651):VPQ:EPLP (SEQ ID NO: 13564), AAPASXX (SEQ ID NO: 13646):VPQ:EPLP (SEQ ID NO: 13564), STPPTXX (SEQ ID NO: 13662):VPQ:EPLP (SEQ ID NO: 13564), HVPKPXX (SEQ ID NO: 13652):VPQ:EPLP (SEQ ID NO: 13564), RVPSTXX (SEQ ID NO: 13659):VPQ:EPLP (SEQ ID NO: 13564), ASASPXX (SEQ ID NO: 13648):VPQ:EPLP (SEQ ID NO: 13564), KIPKAXX (SEQ ID NO: 13655):VPT:EPLP (SEQ ID NO: 13564), GIPEPXX (SEQ ID NO: 13650):VPE:EPLP (SEQ ID NO: 13564), SIPKAXX (SEQ ID NO: 13660):VPT:EPLP (SEQ ID NO: 13564), HVTKPTX (SEQ ID NO: 13653):APT:EPLP (SEQ ID NO: 13564), YVPKPXX (SEQ ID NO: 13664):APT:EPLP (SEQ ID NO: 13564), TVPKPXX (SEQ ID NO: 13663):APT:EPLP (SEQ ID NO: 13564), AVPKAXX (SEQ ID NO: 13649):APT:EPLP (SEQ ID NO: 13564), KVGKAXX (SEQ ID NO: 13656):VPT:EPLP (SEQ ID NO: 13564), KASKAXX (SEQ ID NO: 13654):VPT:EPLP (SEQ ID NO: 13564), GSAGPXX (SEQ ID NO: 13651):TPT:EPLP (SEQ ID NO: 13564), AAPASXX (SEQ ID NO: 13646):VPA:EPLP (SEQ ID NO: 13564), STPPTXX (SEQ ID NO: 13662):VPT:EPLP (SEQ ID NO: 13564), HVPKPXX (SEQ ID NO: 13652):APT:EPLP (SEQ ID NO: 13564), RVPSTXX (SEQ ID NO: 13659):APV:EPLP (SEQ ID NO: 13564), ASASPXX (SEQ ID NO: 13648):VSQ:EPLP (SEQ ID NO: 13564), NDEGLEX (SEQ ID NO: 13657):VPT:EPLP (SEQ ID NO: 13564), SSVKXQP (SEQ ID NO: 13661):SRV:EPLP (SEQ ID NO: 13564), RNVQXRP (SEQ ID NO: 13658):TQV:EPLP (SEQ ID NO: 13564), KIPKAXX (SEQ ID NO: 13655):VSQ:EPLT (SEQ ID NO: 13565), GIPEPXX (SEQ ID NO: 13650):VSQ:EPLT (SEQ ID NO: 13565), SIPKAXX (SEQ ID NO: 13660):VSQ:EPLT (SEQ ID NO: 13565), HVTKPTX (SEQ ID NO: 13653):VSQ:EPLT (SEQ ID NO: 13565), YVPKPXX (SEQ ID NO: 13664):VSQ:EPLT (SEQ ID NO: 13565), TVPKPXX (SEQ ID NO: 13663):VSQ:EPLT (SEQ ID NO: 13565), AVPKAXX (SEQ ID NO: 13649):VSQ:EPLT (SEQ ID NO: 13565), KVGKAXX (SEQ ID NO: 13656):VSQ:EPLT (SEQ ID NO: 13565), KASKAXX (SEQ ID NO: 13654):VSQ:EPLT (SEQ ID NO: 13565), GSAGPXX (SEQ ID NO: 13651):VSQ:EPLT (SEQ ID NO: 13565), AAPASXX (SEQ ID NO: 13646):VSQ:EPLT (SEQ ID NO: 13565), STPPTXX (SEQ ID NO: 13662):VSQ:EPLT (SEQ ID NO: 13565), HVPKPXX (SEQ ID NO: 13652):VSQ:EPLT (SEQ ID NO: 13565), RVPSTXX (SEQ ID NO: 13659):VSQ:EPLT (SEQ ID NO: 13565), ASAAPXX (SEQ ID NO: 13647):VSQ:EPLT (SEQ ID NO: 13565), ASASPXX (SEQ ID NO: 13648):VSQ:EPLT (SEQ ID NO: 13565), KIPKAXX (SEQ ID NO: 13655):VPT:EPLT (SEQ ID NO: 13565), GIPEPXX (SEQ ID NO: 13650):VPE:EPLT (SEQ ID NO: 13565), SIPKAXX (SEQ ID NO: 13660):VPT:EPLT (SEQ ID NO: 13565), HVTKPTX (SEQ ID NO: 13653):APT:EPLT (SEQ ID NO: 13565), YVPKPXX (SEQ ID NO: 13664):APT:EPLT (SEQ ID NO: 13565), TVPKPXX (SEQ ID NO: 13663):APT:EPLT (SEQ ID NO: 13565), AVPKAXX (SEQ ID NO: 13649):APT:EPLT (SEQ ID NO: 13565), KVGKAXX (SEQ ID NO: 13656):VPT:EPLT (SEQ ID NO: 13565), KASKAXX (SEQ ID NO: 13654):VPT:EPLT (SEQ ID NO: 13565), GSAGPXX (SEQ ID NO: 13651):TPT:EPLT (SEQ ID NO: 13565), AAPASXX (SEQ ID NO: 13646):VPA:EPLT (SEQ ID NO: 13565), STPPTXX (SEQ ID NO: 13662):VPT:EPLT (SEQ ID NO: 13565), HVPKPXX (SEQ ID NO: 13652):APT:EPLT (SEQ ID NO: 13565), RVPSTXX (SEQ ID NO: 13659):APV:EPLT (SEQ ID NO: 13565), ASAAPXX (SEQ ID NO: 13647):VPQ:EPLT (SEQ ID NO: 13565), NDEGLEX (SEQ ID NO: 13657):VPT:EPLT (SEQ ID NO: 13565), SSVKXQP (SEQ ID NO: 13661):SRV:EPLT (SEQ ID NO: 13565), RNVQXRP (SEQ ID NO: 13658):TQV:EPLT (SEQ ID NO: 13565), KIPKAXX (SEQ ID NO: 13655):VPQ:EPLT (SEQ ID NO: 13565), GIPEPXX (SEQ ID NO: 13650):VPQ:EPLT (SEQ ID NO: 13565), SIPKAXX (SEQ ID NO: 13660):VPQ:EPLT (SEQ ID NO: 13565), HVTKPTX (SEQ ID NO: 13653):VPQ:EPLT (SEQ ID NO: 13565), YVPKPXX (SEQ ID NO: 13664):VPQ:EPLT (SEQ ID NO: 13565), TVPKPXX (SEQ ID NO: 13663):VPQ:EPLT (SEQ ID NO: 13565), AVPKAXX (SEQ ID NO: 13649):VPQ:EPLT (SEQ ID NO: 13565), KVGKAXX (SEQ ID NO: 13656):VPQ:EPLT (SEQ ID NO: 13565), KASKAXX (SEQ ID NO: 13654):VPQ:EPLT (SEQ ID NO: 13565), GSAGPXX (SEQ ID NO: 13651):VPQ:EPLT (SEQ ID NO: 13565), AAPASXX (SEQ ID NO: 13646):VPQ:EPLT (SEQ ID NO: 13565), STPPTXX (SEQ ID NO: 13662):VPQ:EPLT (SEQ ID NO: 13565), HVPKPXX (SEQ ID NO: 13652):VPQ:EPLT (SEQ ID NO: 13565), RVPSTXX (SEQ ID NO: 13659):VPQ:EPLT (SEQ ID NO: 13565), ASASPXX (SEQ ID NO: 13648):VPQ:EPLT (SEQ ID NO: 13565), NDEGLEX (SEQ ID NO: 13657):VPT:SNIT (SEQ ID NO: 13572), GIPEPXX (SEQ ID NO: 13650):VPE:SNIT (SEQ ID NO: 13572), HVTKPTX (SEQ ID NO: 13653):APT:SNIT (SEQ ID NO: 13572), YVPKPXX (SEQ ID NO: 13664):APT:SNIT (SEQ ID NO: 13572), TVPKPXX (SEQ ID NO: 13663):APT:SNIT (SEQ ID NO: 13572), AVPKAXX (SEQ ID NO: 13649):APT:SNIT (SEQ ID NO: 13572), GSAGPXX (SEQ ID NO: 13651):TPT:SNIT (SEQ ID NO: 13572), AAPASXX (SEQ ID NO: 13646):VPA:SNIT (SEQ ID NO: 13572), HVPKPXX (SEQ ID NO: 13652):APT:SNIT (SEQ ID NO: 13572), RVPSTXX (SEQ ID NO: 13659):APV:SNIT (SEQ ID NO: 13572), ASAAPXX (SEQ ID NO: 13647):VPQ:SNIT (SEQ ID NO: 13572), ASASPXX (SEQ ID NO: 13648):VSQ:SNIT (SEQ ID NO: 13572), ASASPXX (SEQ ID NO: 13648):VPQ:SNIT (SEQ ID NO: 13572), SSVKXQP (SEQ ID NO: 13661):SRV:SNIT (SEQ ID NO: 13572), RNVQXRP (SEQ ID NO: 13658):TQV:SNIT (SEQ ID NO: 13572), RNVQXRP (SEQ ID NO: 13658):SRV:RSVK (SEQ ID NO: 13569), KIPKAXX (SEQ ID NO: 13655):VPT:RSVK (SEQ ID NO: 13569), GIPEPXX (SEQ ID NO: 13650):VPE:RSVK (SEQ ID NO: 13569), SIPKAXX (SEQ ID NO: 13660):VPT:RSVK (SEQ ID NO: 13569), HVTKPTX (SEQ ID NO: 13653):APT:RSVK (SEQ ID NO: 13569), YVPKPXX (SEQ ID NO: 13664):APT:RSVK (SEQ ID NO: 13569), TVPKPXX (SEQ ID NO: 13663):APT:RSVK (SEQ ID NO: 13569), AVPKAXX (SEQ ID NO: 13649):APT:RSVK (SEQ ID NO: 13569), KVGKAXX (SEQ ID NO: 13656):VPT:RSVK (SEQ ID NO: 13569), KASKAXX (SEQ ID NO: 13654):VPT:RSVK (SEQ ID NO: 13569), GSAGPXX (SEQ ID NO: 13651):TPT:RSVK (SEQ ID NO: 13569), AAPASXX (SEQ ID NO: 13646):VPA:RSVK (SEQ ID NO: 13569), STPPTXX (SEQ ID NO: 13662):VPT:RSVK (SEQ ID NO: 13569), HVPKPXX (SEQ ID NO: 13652):APT:RSVK (SEQ ID NO: 13569), RVPSTXX (SEQ ID NO: 13659):APV:RSVK (SEQ ID NO: 13569), ASAAPXX (SEQ ID NO: 13647):VPQ:RSVK (SEQ ID NO: 13569), ASASPXX (SEQ ID NO: 13648):VSQ:RSVK (SEQ ID NO: 13569), ASASPXX (SEQ ID NO: 13648):VPQ:RSVK (SEQ ID NO: 13569), NDEGLEX (SEQ ID NO: 13657):VPT:RSVK (SEQ ID NO: 13569), RNVQXRP (SEQ ID NO: 13658):TQV:RSVK (SEQ ID NO: 13569), SSVKXQP (SEQ ID NO: 13661):TQV:RPVQ (SEQ ID NO: 13568), KIPKAXX (SEQ ID NO: 13655):VPT:RPVQ (SEQ ID NO: 13568), GIPEPXX (SEQ ID NO: 13650):VPE:RPVQ (SEQ ID NO: 13568), SIPKAXX (SEQ ID NO: 13660):VPT:RPVQ (SEQ ID NO: 13568), HVTKPTX (SEQ ID NO: 13653):APT:RPVQ (SEQ ID NO: 13568), YVPKPXX (SEQ ID NO: 13664):APT:RPVQ (SEQ ID NO: 13568), TVPKPXX (SEQ ID NO: 13663):APT:RPVQ (SEQ ID NO: 13568), AVPKAXX (SEQ ID NO: 13649):APT:RPVQ (SEQ ID NO: 13568), KVGKAXX (SEQ ID NO: 13656):VPT:RPVQ (SEQ ID NO: 13568), KASKAXX (SEQ ID NO: 13654):VPT:RPVQ (SEQ ID NO: 13568), GSAGPXX (SEQ ID NO: 13651):TPT:RPVQ (SEQ ID NO: 13568), AAPASXX (SEQ ID NO: 13646):VPA:RPVQ (SEQ ID NO: 13568), STPPTXX (SEQ ID NO: 13662):VPT:RPVQ (SEQ ID NO: 13568), HVPKPXX (SEQ ID NO: 13652):APT:RPVQ (SEQ ID NO: 13568), RVPSTXX (SEQ ID NO: 13659):APV:RPVQ (SEQ ID NO: 13568), ASAAPXX (SEQ ID NO: 13647):VPQ:RPVQ (SEQ ID NO: 13568), ASASPXX (SEQ ID NO: 13648):VSQ:RPVQ (SEQ ID NO: 13568), ASASPXX (SEQ ID NO: 13648):VPQ:RPVQ (SEQ ID NO: 13568), NDEGLEX (SEQ ID NO: 13657):VPT:RPVQ (SEQ ID NO: 13568) and SSVKXQP (SEQ ID NO: 13661):SRV:RPVQ (SEQ ID NO: 13568).

[0310] In certain embodiments, the triplet PEP7:PEP3:PEP12 is selected from the group consisting of GIPEPXX (SEQ ID NO: 13650):VPT:SAIS-AA¹⁷-LYL (SEQ ID NO: 13808), HVTKPTX (SEQ ID NO: 13653):VPT:SAIS-AA¹⁷-LYL (SEQ ID NO: 13808), YVPKPXX (SEQ ID NO: 13664):VPT:SAIS-AA¹⁷-LYL (SEQ ID NO: 13808), TVPKPXX (SEQ ID NO: 13663):VPT:SAIS-AA¹⁷-LYL (SEQ ID NO: 13808), AVPKAXX (SEQ ID NO: 13649):VPT:SAIS-AA¹⁷-LYL (SEQ ID NO: 13808), KVGKAXX (SEQ ID NO: 13656):VPT:SAIS-AA¹⁷-LYL (SEQ ID NO: 13808), KASKAXX (SEQ ID NO: 13654):VPT:SAIS-AA¹⁷-LYL (SEQ ID NO: 13808), GSAGPXX (SEQ ID NO: 13651):VPT:SAIS-AA¹⁷-LYL (SEQ ID NO: 13808), AAPASXX (SEQ ID NO: 13646):VPT:SAIS-AA¹⁷-LYL (SEQ ID NO: 13808), STPPTXX (SEQ ID NO: 13662):VPT:SAIS-AA¹⁷-LYL (SEQ ID NO: 13808), HVPKPXX (SEQ ID NO: 13652):VPT:SAIS-AA¹⁷-LYL (SEQ ID NO: 13808), RVPSTXX (SEQ ID NO: 13659):VPT:SAIS-AA¹⁷-LYL (SEQ ID NO: 13808), ASAAPXX (SEQ ID NO: 13647):VPT:SAIS-AA¹⁷-LYL (SEQ ID NO: 13808), ASASPXX (SEQ ID NO: 13648):VPT:SAIS-AA¹⁷-LYL (SEQ ID NO: 13808), GIPEPXX (SEQ ID NO: 13650):VPE:SAIS-AA¹⁷-LYL (SEQ ID NO: 13808), HVTKPTX (SEQ ID NO: 13653):APT:SAIS-AA¹⁷-LYL (SEQ ID NO: 13808), YVPKPXX (SEQ ID NO: 13664):APT:SAIS-AA¹⁷-LYL (SEQ ID NO: 13808), TVPKPXX (SEQ ID NO: 13663):APT:SAIS-AA¹⁷-LYL (SEQ ID NO: 13808), AVPKAXX (SEQ ID NO: 13649):APT:SAIS-AA¹⁷-LYL (SEQ ID NO: 13808), GSAGPXX (SEQ ID NO: 13651):TPT:SAIS-AA¹⁷-LYL (SEQ ID NO: 13808), AAPASXX (SEQ ID NO: 13646):VPA:SAIS-AA¹⁷-LYL (SEQ ID NO: 13808), HVPKPXX (SEQ ID NO: 13652):APT:SAIS-AA¹⁷-LYL (SEQ ID NO: 13808), RVPSTXX (SEQ ID NO: 13659):APV:SAIS-AA¹⁷-LYL (SEQ ID NO: 13808), ASAAPXX (SEQ ID NO: 13647):VPQ:SAIS-AA¹⁷-LYL (SEQ ID NO: 13808), ASASPXX (SEQ ID NO: 13648):VSQ:SAIS-AA¹⁷-LYL (SEQ ID NO: 13808), ASASPXX (SEQ ID NO: 13648):VPQ:SAIS-AA¹⁷-LYL (SEQ ID NO: 13808), SSVKXQP (SEQ ID NO: 13661):SRV:SAIS-AA¹⁷-LYL (SEQ ID NO: 13808), RNVQXRP (SEQ ID NO: 13658):TQV:SAIS-AA¹⁷-LYL (SEQ ID NO: 13808), KIPKAXX (SEQ ID NO: 13655):VPE:SSLS-AA¹⁷-LFF (SEQ ID NO: 13815), SIPKAXX (SEQ ID NO: 13660):VPE:SSLS-AA¹⁷-LFF (SEQ ID NO: 13815), HVTKPTX (SEQ ID NO: 13653):VPE:SSLS-AA¹⁷-LFF (SEQ ID NO: 13815), YVPKPXX (SEQ ID NO: 13664):VPE:SSLS-AA¹⁷-LFF (SEQ ID NO: 13815), TVPKPXX (SEQ ID NO: 13663):VPE:SSLS-AA¹⁷-LFF (SEQ ID NO: 13815), AVPKAXX (SEQ ID NO: 13649):VPE:SSLS-AA¹⁷-LFF (SEQ ID NO: 13815), KVGKAXX (SEQ ID NO: 13656):VPE:SSLS-AA¹⁷-LFF (SEQ ID NO: 13815), KASKAXX (SEQ ID NO: 13654):VPE:SSLS-AA¹⁷-LFF (SEQ ID NO: 13815), GSAGPXX (SEQ ID NO: 13651):VPE:SSLS-AA¹⁷-LFF (SEQ ID NO: 13815), AAPASXX (SEQ ID NO: 13646):VPE:SSLS-AA¹⁷-LFF (SEQ ID NO: 13815), STPPTXX (SEQ ID NO: 13662):VPE:SSLS-AA¹⁷-LFF (SEQ ID NO: 13815), HVPKPXX (SEQ ID NO: 13652):VPE:SSLS-AA¹⁷-LFF (SEQ ID NO: 13815), RVPSTXX (SEQ ID NO: 13659):VPE:SSLS-AA¹⁷-LFF (SEQ ID NO: 13815), ASAAPXX (SEQ ID NO: 13647):VPE:SSLS-AA¹⁷-LFF (SEQ ID NO: 13815), ASASPXX (SEQ ID NO: 13648):VPE:SSLS-AA¹⁷-LFF (SEQ ID NO: 13815), KIPKAXX (SEQ ID NO: 13655):VPT:SSLS-AA¹⁷-LFF (SEQ ID NO: 13815), SIPKAXX (SEQ ID NO: 13660):VPT:SSLS-AA¹⁷-LFF (SEQ ID NO: 13815), HVTKPTX (SEQ ID NO: 13653):APT:SSLS-AA¹⁷-LFF (SEQ ID NO: 13815), YVPKPXX (SEQ ID NO: 13664):APT:SSLS-AA¹⁷-LFF (SEQ ID NO: 13815), TVPKPXX (SEQ ID NO: 13663):APT:SSLS-AA¹⁷-LFF (SEQ ID NO: 13815), AVPKAXX (SEQ ID NO: 13649):APT:SSLS-AA¹⁷-LFF (SEQ ID NO: 13815), KVGKAXX (SEQ ID NO: 13656):VPT:SSLS-AA¹⁷-LFF (SEQ ID NO: 13815), KASKAXX (SEQ ID NO: 13654):VPT:SSLS-AA¹⁷-LFF (SEQ ID NO: 13815), GSAGPXX (SEQ ID NO: 13651):TPT:SSLS-AA¹⁷-LFF (SEQ ID NO: 13815), AAPASXX (SEQ ID NO: 13646):VPA:SSLS-AA¹⁷-LFF (SEQ ID NO: 13815), STPPTXX (SEQ ID NO: 13662):VPT:SSLS-AA¹⁷-LFF (SEQ ID NO: 13815), HVPKPXX (SEQ ID NO: 13652):APT:SSLS-AA¹⁷-LFF (SEQ ID NO: 13815), RVPSTXX (SEQ ID NO: 13659):APV:SSLS-AA¹⁷-LFF (SEQ ID NO: 13815), ASAAPXX (SEQ ID NO: 13647):VPQ:SSLS-AA¹⁷-LFF (SEQ ID NO: 13815), ASASPXX (SEQ ID NO: 13648):VSQ:SSLS-AA¹⁷-LFF (SEQ ID NO: 13815), ASASPXX (SEQ ID NO: 13648):VPQ:SSLS-AA¹⁷-LFF (SEQ ID NO: 13815), NDEGLEX (SEQ ID NO: 13657):VPT:SSLS-AA¹⁷-LFF (SEQ ID NO: 13815), SSVKXQP (SEQ ID NO: 13661):SRV:SSLS-AA¹⁷-LFF (SEQ ID NO: 13815), RNVQXRP (SEQ ID NO: 13658):TQV:SSLS-AA¹⁷-LFF (SEQ ID NO: 13815), KIPKAXX (SEQ ID NO: 13655):APT:NAIS-AA¹⁷-LYF (SEQ ID NO: 13805), GIPEPXX (SEQ ID NO: 13650):APT:NAIS-AA¹⁷-LYF (SEQ ID NO: 13805), SIPKAXX (SEQ ID NO: 13660):APT:NAIS-AA¹⁷-LYF (SEQ ID NO: 13805), AVPKAXX (SEQ ID NO: 13649):APT:NAIS-AA¹⁷-LYF (SEQ ID NO: 13805), KVGKAXX (SEQ ID NO: 13656):APT:NAIS-AA¹⁷-LYF (SEQ ID NO: 13805), KASKAXX (SEQ ID NO: 13654):APT:NAIS-AA¹⁷-LYF (SEQ ID NO: 13805), GSAGPXX (SEQ ID NO: 13651):APT:NAIS-AA¹⁷-LYF (SEQ ID NO: 13805), AAPASXX (SEQ ID NO: 13646):APT:NAIS-AA¹⁷-LYF (SEQ ID NO: 13805), STPPTXX (SEQ ID NO: 13662):APT:NAIS-AA¹⁷-LYF (SEQ ID NO: 13805), RVPSTXX (SEQ ID NO: 13659):APT:NAIS-AA¹⁷-LYF (SEQ ID NO: 13805), ASAAPXX (SEQ ID NO: 13647):APT:NAIS-AA¹⁷-LYF (SEQ ID NO: 13805), ASASPXX (SEQ ID NO: 13648):APT:NAIS-AA¹⁷-LYF (SEQ ID NO: 13805), KIPKAXX (SEQ ID NO: 13655):VPT:NAIS-AA¹⁷-LYF (SEQ ID NO: 13805), GIPEPXX (SEQ ID NO: 13650):VPE:NAIS-AA¹⁷-LYF (SEQ ID NO: 13805), SIPKAXX (SEQ ID NO: 13660):VPT:NAIS-AA¹⁷-LYF (SEQ ID NO: 13805), KVGKAXX (SEQ ID NO: 13656):VPT:NAIS-AA¹⁷-LYF (SEQ ID NO: 13805), KASKAXX (SEQ ID NO: 13654):VPT:NAIS-AA¹⁷-LYF (SEQ ID NO: 13805), GSAGPXX (SEQ ID NO: 13651):TPT:NAIS-AA¹⁷-LYF (SEQ ID NO: 13805), AAPASXX (SEQ ID NO: 13646):VPA:NAIS-AA¹⁷-LYF (SEQ ID NO: 13805), STPPTXX (SEQ ID NO: 13662):VPT:NAIS-AA¹⁷-LYF (SEQ ID NO: 13805), RVPSTXX (SEQ ID NO: 13659):APV:NAIS-AA¹⁷-LYF (SEQ ID NO: 13805), ASAAPXX (SEQ ID NO: 13647):VPQ:NAIS-AA¹⁷-LYF (SEQ ID NO: 13805), ASASPXX (SEQ ID NO: 13648):VSQ:NAIS-AA¹⁷-LYF (SEQ ID NO: 13805), ASASPXX (SEQ ID NO: 13648):VPQ:NAIS-AA¹⁷-LYF (SEQ ID NO: 13805), NDEGLEX (SEQ ID NO: 13657):VPT:NAIS-AA¹⁷-LYF (SEQ ID NO: 13805), SSVKXQP (SEQ ID NO: 13661):SRV:NAIS-AA¹⁷-LYF (SEQ ID NO: 13805), RNVQXRP (SEQ ID NO: 13658):TQV:NAIS-AA¹⁷-LYF (SEQ ID NO: 13805), KIPKAXX (SEQ ID NO: 13655):APT:SATS-AA¹⁷-LYY (SEQ ID NO: 13809), GIPEPXX (SEQ ID NO: 13650):APT:SATS-AA¹⁷-LYY (SEQ ID NO: 13809), SIPKAXX (SEQ ID NO: 13660):APT:SATS-AA¹⁷-LYY (SEQ ID NO: 13809), HVTKPTX (SEQ ID NO: 13653):APT:SATS-AA¹⁷-LYY (SEQ ID NO: 13809), YVPKPXX (SEQ ID NO: 13664):APT:SATS-AA¹⁷-LYY (SEQ ID NO: 13809), TVPKPXX (SEQ ID NO: 13663):APT:SATS-AA¹⁷-LYY (SEQ ID NO: 13809), KVGKAXX (SEQ ID NO: 13656):APT:SATS-AA¹⁷-LYY (SEQ ID NO: 13809), KASKAXX (SEQ ID NO: 13654):APT:SATS-AA¹⁷-LYY (SEQ ID NO: 13809), GSAGPXX (SEQ ID NO: 13651):APT:SATS-AA¹⁷-LYY (SEQ ID NO: 13809), AAPASXX (SEQ ID NO: 13646):APT:SATS-AA¹⁷-LYY (SEQ ID NO: 13809), STPPTXX (SEQ ID NO: 13662):APT:SATS-AA¹⁷-LYY (SEQ ID NO: 13809), HVPKPXX (SEQ ID NO: 13652):APT:SATS-AA¹⁷-LYY (SEQ ID NO: 13809), RVPSTXX (SEQ ID NO: 13659):APT:SATS-AA¹⁷-LYY (SEQ ID NO: 13809), ASAAPXX (SEQ ID NO: 13647):APT:SATS-AA¹⁷-LYY (SEQ ID NO: 13809), ASASPXX (SEQ ID NO: 13648):APT:SATS-AA¹⁷-LYY (SEQ ID NO: 13809), KIPKAXX (SEQ ID NO: 13655):VPT:SATS-AA¹⁷-LYY (SEQ ID NO: 13809), GIPEPXX (SEQ ID NO: 13650):VPE:SATS-AA¹⁷-LYY (SEQ ID NO: 13809), SIPKAXX (SEQ ID NO: 13660):VPT:SATS-AA¹⁷-LYY (SEQ ID NO: 13809), KVGKAXX (SEQ ID NO: 13656):VPT:SATS-AA¹⁷-LYY (SEQ ID NO: 13809), KASKAXX (SEQ ID NO: 13654):VPT:SATS-AA¹⁷-LYY (SEQ ID NO: 13809), GSAGPXX (SEQ ID NO: 13651):TPT:SATS-AA¹⁷-LYY (SEQ ID NO: 13809), AAPASXX (SEQ ID NO: 13646):VPA:SATS-AA¹⁷-LYY (SEQ ID NO: 13809), STPPTXX (SEQ ID NO: 13662):VPT:SATS-AA¹⁷-LYY (SEQ ID NO: 13809), RVPSTXX (SEQ ID NO: 13659):APV:SATS-AA¹⁷-LYY (SEQ ID NO: 13809), ASAAPXX (SEQ ID NO: 13647):VPQ:SATS-AA¹⁷-LYY (SEQ ID NO: 13809), ASASPXX (SEQ ID NO: 13648):VSQ:SATS-AA¹⁷-LYY (SEQ ID NO: 13809), ASASPXX (SEQ ID NO: 13648):VPQ:SATS-AA¹⁷-LYY (SEQ ID NO: 13809), NDEGLEX (SEQ ID NO: 13657):VPT:SATS-AA¹⁷-LYY (SEQ ID NO: 13809), SSVKXQP (SEQ ID NO: 13661):SRV:SATS-AA¹⁷-LYY (SEQ ID NO: 13809), RNVQXRP (SEQ ID NO: 13658):TQV:SATS-AA¹⁷-LYY (SEQ ID NO: 13809), KIPKAXX (SEQ ID NO: 13655):VPT:SPIS-AA¹⁷-LYK (SEQ ID NO: 13814), GIPEPXX (SEQ ID NO: 13650):VPT:SPIS-AA¹⁷-LYK (SEQ ID NO: 13814), SIPKAXX (SEQ ID NO: 13660):VPT:SPIS-AA¹⁷-LYK (SEQ ID NO: 13814), HVTKPTX (SEQ ID NO: 13653):VPT:SPIS-AA¹⁷-LYK (SEQ ID NO: 13814), YVPKPXX (SEQ ID NO: 13664):VPT:SPIS-AA¹⁷-LYK (SEQ ID NO: 13814), TVPKPXX (SEQ ID NO: 13663):VPT:SPIS-AA¹⁷-LYK (SEQ ID NO: 13814), AVPKAXX (SEQ ID NO: 13649):VPT:SPIS-AA¹⁷-LYK (SEQ ID NO: 13814), KASKAXX (SEQ ID NO: 13654):VPT:SPIS-AA¹⁷-LYK (SEQ ID NO: 13814), GSAGPXX (SEQ ID NO: 13651):VPT:SPIS-AA¹⁷-LYK (SEQ ID NO: 13814), AAPASXX (SEQ ID NO: 13646):VPT:SPIS-AA¹⁷-LYK (SEQ ID NO: 13814), STPPTXX (SEQ ID NO: 13662):VPT:SPIS-AA¹⁷-LYK (SEQ ID NO: 13814), HVPKPXX (SEQ ID NO: 13652):VPT:SPIS-AA¹⁷-LYK (SEQ ID NO: 13814), RVPSTXX (SEQ ID NO: 13659):VPT:SPIS-AA¹⁷-LYK (SEQ ID NO: 13814), ASAAPXX (SEQ ID NO: 13647):VPT:SPIS-AA¹⁷-LYK (SEQ ID NO: 13814), ASASPXX (SEQ ID NO: 13648):VPT:SPIS-AA¹⁷-LYK (SEQ ID NO: 13814), GIPEPXX (SEQ ID NO: 13650):VPE:SPIS-AA¹⁷-LYK (SEQ ID NO: 13814), HVTKPTX (SEQ ID NO: 13653):APT:SPIS-AA¹⁷-LYK (SEQ ID NO: 13814), YVPKPXX (SEQ ID NO: 13664):APT:SPIS-AA¹⁷-LYK (SEQ ID NO: 13814), TVPKPXX (SEQ ID NO: 13663):APT:SPIS-AA¹⁷-LYK (SEQ ID NO: 13814), AVPKAXX (SEQ ID NO: 13649):APT:SPIS-AA¹⁷-LYK (SEQ ID NO: 13814), GSAGPXX (SEQ ID NO: 13651):TPT:SPIS-AA¹⁷-LYK (SEQ ID NO: 13814), AAPASXX (SEQ ID NO: 13646):VPA:SPIS-AA¹⁷-LYK (SEQ ID NO: 13814), HVPKPXX (SEQ ID NO: 13652):APT:SPIS-AA¹⁷-LYK (SEQ ID NO: 13814), RVPSTXX (SEQ ID NO: 13659):APV:SPIS-AA¹⁷-LYK (SEQ ID NO: 13814), ASAAPXX (SEQ ID NO: 13647):VPQ:SPIS-AA¹⁷-LYK (SEQ ID NO: 13814), ASASPXX (SEQ ID NO: 13648):VSQ:SPIS-AA¹⁷-LYK (SEQ ID NO: 13814), ASASPXX (SEQ ID NO: 13648):VPQ:SPIS-AA¹⁷-LYK (SEQ ID NO: 13814), SSVKXQP (SEQ ID NO: 13661):SRV:SPIS-AA¹⁷-LYK (SEQ ID NO: 13814), RNVQXRP (SEQ ID NO: 13658):TQV:SPIS-AA¹⁷-LYK (SEQ ID NO: 13814), KIPKAXX (SEQ ID NO: 13655):VPT:EPIS-AA¹⁷-LYL (SEQ ID NO: 13801), GIPEPXX (SEQ ID NO: 13650):VPT:EPIS-AA¹⁷-LYL (SEQ ID NO: 13801), SIPKAXX (SEQ ID NO: 13660):VPT:EPIS-AA¹⁷-LYL (SEQ ID NO: 13801), HVTKPTX (SEQ ID NO: 13653):VPT:EPIS-AA¹⁷-LYL (SEQ ID NO: 13801), YVPKPXX (SEQ ID NO: 13664):VPT:EPIS-AA¹⁷-LYL (SEQ ID NO: 13801), TVPKPXX (SEQ ID NO: 13663):VPT:EPIS-AA¹⁷-LYL (SEQ ID NO: 13801), AVPKAXX (SEQ ID NO: 13649):VPT:EPIS-AA¹⁷-LYL (SEQ ID NO: 13801), KVGKAXX (SEQ ID NO: 13656):VPT:EPIS-AA¹⁷-LYL (SEQ ID NO: 13801), GSAGPXX (SEQ ID NO: 13651):VPT:EPIS-AA¹⁷-LYL (SEQ ID NO: 13801), AAPASXX (SEQ ID NO: 13646):VPT:EPIS-AA¹⁷-LYL (SEQ ID NO: 13801), STPPTXX (SEQ ID NO: 13662):VPT:EPIS-AA¹⁷-LYL (SEQ ID NO: 13801), HVPKPXX (SEQ ID NO: 13652):VPT:EPIS-AA¹⁷-LYL (SEQ ID NO: 13801), RVPSTXX (SEQ ID NO: 13659):VPT:EPIS-AA¹⁷-LYL (SEQ ID NO: 13801), ASAAPXX (SEQ ID NO: 13647):VPT:EPIS-AA¹⁷-LYL (SEQ ID NO: 13801), ASASPXX (SEQ ID NO: 13648):VPT:EPIS-AA¹⁷-LYL (SEQ ID NO: 13801), GIPEPXX (SEQ ID NO: 13650):VPE:EPIS-AA¹⁷-LYL (SEQ ID NO: 13801), HVTKPTX (SEQ ID NO: 13653):APT:EPIS-AA¹⁷-LYL (SEQ ID NO: 13801), YVPKPXX (SEQ ID NO: 13664):APT:EPIS-AA¹⁷-LYL (SEQ ID NO: 13801), TVPKPXX (SEQ ID NO: 13663):APT:EPIS-AA¹⁷-LYL (SEQ ID NO: 13801), AVPKAXX (SEQ ID NO: 13649):APT:EPIS-AA¹⁷-LYL (SEQ ID NO: 13801), GSAGPXX (SEQ ID NO: 13651):TPT:EPIS-AA¹⁷-LYL (SEQ ID NO: 13801), AAPASXX (SEQ ID NO: 13646):VPA:EPIS-AA¹⁷-LYL (SEQ ID NO: 13801), HVPKPXX (SEQ ID NO: 13652):APT:EPIS-AA¹⁷-LYL (SEQ ID NO: 13801), RVPSTXX (SEQ ID NO: 13659):APV:EPIS-AA¹⁷-LYL (SEQ ID NO: 13801), ASAAPXX (SEQ ID NO: 13647):VPQ:EPIS-AA¹⁷-LYL (SEQ ID NO: 13801), ASASPXX (SEQ ID NO: 13648):VSQ:EPIS-AA¹⁷-LYL (SEQ ID NO: 13801), ASASPXX (SEQ ID NO: 13648):VPQ:EPIS-AA¹⁷-LYL (SEQ ID NO: 13801), SSVKXQP (SEQ ID NO: 13661):SRV:EPIS-AA¹⁷-LYL (SEQ ID NO: 13801), RNVQXRP (SEQ ID NO: 13658):TQV:EPIS-AA¹⁷-LYL (SEQ ID NO: 13801), KIPKAXX (SEQ ID NO: 13655):TPT:SPIN-AA¹⁷-LYF (SEQ ID NO: 13811), GIPEPXX (SEQ ID NO: 13650):TPT:SPIN-AA¹⁷-LYF (SEQ ID NO: 13811), SIPKAXX (SEQ ID NO: 13660):TPT:SPIN-AA¹⁷-LYF (SEQ ID NO: 13811), HVTKPTX (SEQ ID NO: 13653):TPT:SPIN-AA¹⁷-LYF (SEQ ID NO: 13811), YVPKPXX (SEQ ID NO: 13664):TPT:SPIN-AA¹⁷-LYF (SEQ ID NO: 13811), TVPKPXX (SEQ ID NO: 13663):TPT:SPIN-AA¹⁷-LYF (SEQ ID NO: 13811), AVPKAXX (SEQ ID NO: 13649):TPT:SPIN-AA¹⁷-LYF (SEQ ID NO: 13811), KVGKAXX (SEQ ID NO: 13656):TPT:SPIN-AA¹⁷-LYF (SEQ ID NO: 13811), KASKAXX (SEQ ID NO: 13654):TPT:SPIN-AA¹⁷-LYF (SEQ ID NO: 13811), AAPASXX (SEQ ID NO: 13646):TPT:SPIN-AA¹⁷-LYF (SEQ ID NO: 13811), STPPTXX (SEQ ID NO: 13662):TPT:SPIN-AA¹⁷-LYF (SEQ ID NO: 13811), HVPKPXX (SEQ ID NO: 13652):TPT:SPIN-AA¹⁷-LYF (SEQ ID NO: 13811), RVPSTXX (SEQ ID NO: 13659):TPT:SPIN-AA¹⁷-LYF (SEQ ID NO: 13811), ASAAPXX (SEQ ID NO: 13647):TPT:SPIN-AA¹⁷-LYF (SEQ ID NO: 13811), ASASPXX (SEQ ID NO: 13648):TPT:SPIN-AA¹⁷-LYF (SEQ ID NO: 13811), KIPKAXX (SEQ ID NO: 13655):VPT:SPIN-AA¹⁷-LYF (SEQ ID NO: 13811), GIPEPXX (SEQ ID NO: 13650):VPE:SPIN-AA¹⁷-LYF (SEQ ID NO: 13811), SIPKAXX (SEQ ID NO: 13660):VPT:SPIN-AA¹⁷-LYF (SEQ ID NO: 13811), HVTKPTX (SEQ ID NO: 13653):APT:SPIN-AA¹⁷-LYF (SEQ ID NO: 13811), YVPKPXX (SEQ ID NO: 13664):APT:SPIN-AA¹⁷-LYF (SEQ ID NO: 13811), TVPKPXX (SEQ ID NO: 13663):APT:SPIN-AA¹⁷-LYF (SEQ ID NO: 13811), AVPKAXX (SEQ ID NO: 13649):APT:SPIN-AA¹⁷-LYF (SEQ ID NO: 13811), KVGKAXX (SEQ ID NO: 13656):VPT:SPIN-AA¹⁷-LYF (SEQ ID NO: 13811), KASKAXX (SEQ ID NO: 13654):VPT:SPIN-AA¹⁷-LYF (SEQ ID NO: 13811), AAPASXX (SEQ ID NO: 13646):VPA:SPIN-AA¹⁷-LYF (SEQ ID NO: 13811), STPPTXX (SEQ ID NO: 13662):VPT:SPIN-AA¹⁷-LYF (SEQ ID NO: 13811), HVPKPXX (SEQ ID NO: 13652):APT:SPIN-AA¹⁷-LYF (SEQ ID NO: 13811), RVPSTXX (SEQ ID NO: 13659):APV:SPIN-AA¹⁷-LYF (SEQ ID NO: 13811), ASAAPXX (SEQ ID NO: 13647):VPQ:SPIN-AA¹⁷-LYF (SEQ ID NO: 13811), ASASPXX (SEQ ID NO: 13648):VSQ:SPIN-AA¹⁷-LYF (SEQ ID NO: 13811), ASASPXX (SEQ ID NO: 13648):VPQ:SPIN-AA¹⁷-LYF (SEQ ID NO: 13811), NDEGLEX (SEQ ID NO: 13657):VPT:SPIN-AA¹⁷-LYF (SEQ ID NO: 13811), SSVKXQP (SEQ ID NO: 13661):SRV:SPIN-AA¹⁷-LYF (SEQ ID NO: 13811), RNVQXRP (SEQ ID NO: 13658):TQV:SPIN-AA¹⁷-LYF (SEQ ID NO: 13811), KIPKAXX (SEQ ID NO: 13655):VPA:SPIS-AA¹⁷-LYI (SEQ ID NO: 13813), GIPEPXX (SEQ ID NO: 13650):VPA:SPIS-AA¹⁷-LYI (SEQ ID NO: 13813), SIPKAXX (SEQ ID NO: 13660):VPA:SPIS-AA¹⁷-LYI (SEQ ID NO: 13813), HVTKPTX (SEQ ID NO: 13653):VPA:SPIS-AA¹⁷-LYI (SEQ ID NO: 13813), YVPKPXX (SEQ ID NO: 13664):VPA:SPIS-AA¹⁷-LYI (SEQ ID NO: 13813), TVPKPXX (SEQ ID NO: 13663):VPA:SPIS-AA¹⁷-LYI (SEQ ID NO: 13813), AVPKAXX (SEQ ID NO: 13649):VPA:SPIS-AA¹⁷-LYI (SEQ ID NO: 13813), KVGKAXX (SEQ ID NO: 13656):VPA:SPIS-AA¹⁷-LYI (SEQ ID NO: 13813), KASKAXX (SEQ ID NO: 13654):VPA:SPIS-AA¹⁷-LYI (SEQ ID NO: 13813), GSAGPXX (SEQ ID NO: 13651):VPA:SPIS-AA¹⁷-LYI (SEQ ID NO: 13813), STPPTXX (SEQ ID NO: 13662):VPA:SPIS-AA¹⁷-LYI (SEQ ID NO: 13813), HVPKPXX (SEQ ID NO: 13652):VPA:SPIS-AA¹⁷-LYI (SEQ ID NO: 13813), RVPSTXX (SEQ ID NO: 13659):VPA:SPIS-AA¹⁷-LYI (SEQ ID NO: 13813), ASAAPXX (SEQ ID NO: 13647):VPA:SPIS-AA¹⁷-LYI (SEQ ID NO: 13813), ASASPXX (SEQ ID NO: 13648):VPA:SPIS-AA¹⁷-LYI (SEQ ID NO: 13813), KIPKAXX (SEQ ID NO: 13655):VPT:SPIS-AA¹⁷-LYI (SEQ ID NO: 13813), GIPEPXX (SEQ ID NO: 13650):VPE:SPIS-AA¹⁷-LYI (SEQ ID NO: 13813), SIPKAXX (SEQ ID NO: 13660):VPT:SPIS-AA¹⁷-LYI (SEQ ID NO: 13813), HVTKPTX (SEQ ID NO: 13653):APT:SPIS-AA¹⁷-LYI (SEQ ID NO: 13813), YVPKPXX (SEQ ID NO: 13664):APT:SPIS-AA¹⁷-LYI (SEQ ID NO: 13813), TVPKPXX (SEQ ID NO: 13663):APT:SPIS-AA¹⁷-LYI (SEQ ID NO: 13813), AVPKAXX (SEQ ID NO: 13649):APT:SPIS-AA¹⁷-LYI (SEQ ID NO: 13813), KVGKAXX (SEQ ID NO: 13656):VPT:SPIS-AA¹⁷-LYI (SEQ ID NO: 13813), KASKAXX (SEQ ID NO: 13654):VPT:SPIS-AA¹⁷-LYI (SEQ ID NO: 13813), GSAGPXX (SEQ ID NO: 13651):TPT:SPIS-AA¹⁷-LYI (SEQ ID NO: 13813), STPPTXX (SEQ ID NO: 13662):VPT:SPIS-AA¹⁷-LYI (SEQ ID NO: 13813), HVPKPXX (SEQ ID NO: 13652):APT:SPIS-AA¹⁷-LYI (SEQ ID NO: 13813), RVPSTXX (SEQ ID NO: 13659):APV:SPIS-AA¹⁷-LYI (SEQ ID NO: 13813), ASAAPXX (SEQ ID NO: 13647):VPQ:SPIS-AA¹⁷-LYI (SEQ ID NO: 13813), ASASPXX (SEQ ID NO: 13648):VSQ:SPIS-AA¹⁷-LYI (SEQ ID NO: 13813), ASASPXX (SEQ ID NO: 13648):VPQ:SPIS-AA¹⁷-LYI (SEQ ID NO: 13813), NDEGLEX (SEQ ID NO: 13657):VPT:SPIS-AA¹⁷-LYI (SEQ ID NO: 13813), SSVKXQP (SEQ ID NO: 13661):SRV:SPIS-AA¹⁷-LYI (SEQ ID NO: 13813), RNVQXRP (SEQ ID NO: 13658):TQV:SPIS-AA¹⁷-LYI (SEQ ID NO: 13813), KIPKAXX (SEQ ID NO: 13655):VPT:SPIS-AA¹⁷-LFI (SEQ ID NO: 13812), GIPEPXX (SEQ ID NO: 13650):VPT:SPIS-AA¹⁷-LFI (SEQ ID NO: 13812), SIPKAXX (SEQ ID NO: 13660):VPT:SPIS-AA¹⁷-LFI (SEQ ID NO: 13812), HVTKPTX (SEQ ID NO: 13653):VPT:SPIS-AA¹⁷-LFI (SEQ ID NO: 13812), YVPKPXX (SEQ ID NO: 13664):VPT:SPIS-AA¹⁷-LFI (SEQ ID NO: 13812), TVPKPXX (SEQ ID NO: 13663):VPT:SPIS-AA¹⁷-LFI (SEQ ID NO: 13812), AVPKAXX (SEQ ID NO: 13649):VPT:SPIS-AA¹⁷-LFI (SEQ ID NO: 13812), KVGKAXX (SEQ ID NO: 13656):VPT:SPIS-AA¹⁷-LFI (SEQ ID NO: 13812), KASKAXX (SEQ ID NO: 13654):VPT:SPIS-AA¹⁷-LFI (SEQ ID NO: 13812), GSAGPXX (SEQ ID NO: 13651):VPT:SPIS-AA¹⁷-LFI (SEQ ID NO: 13812), AAPASXX (SEQ ID NO: 13646):VPT:SPIS-AA¹⁷-LFI (SEQ ID NO: 13812), HVPKPXX (SEQ ID NO: 13652):VPT:SPIS-AA¹⁷-LFI (SEQ ID NO: 13812), RVPSTXX (SEQ ID NO: 13659):VPT:SPIS-AA¹⁷-LFI (SEQ ID NO: 13812), ASAAPXX (SEQ ID NO: 13647):VPT:SPIS-AA¹⁷-LFI (SEQ ID NO: 13812), ASASPXX (SEQ ID NO: 13648):VPT:SPIS-AA¹⁷-LFI (SEQ ID NO: 13812), GIPEPXX (SEQ ID NO: 13650):VPE:SPIS-AA¹⁷-LFI (SEQ ID NO: 13812), HVTKPTX (SEQ ID NO: 13653):APT:SPIS-AA¹⁷-LFI (SEQ ID NO: 13812), YVPKPXX (SEQ ID NO: 13664):APT:SPIS-AA¹⁷-LFI (SEQ ID NO: 13812), TVPKPXX (SEQ ID NO: 13663):APT:SPIS-AA¹⁷-LFI (SEQ ID NO: 13812), AVPKAXX (SEQ ID NO: 13649):APT:SPIS-AA¹⁷-LFI (SEQ ID NO: 13812), GSAGPXX (SEQ ID NO: 13651):TPT:SPIS-AA¹⁷-LFI (SEQ ID NO: 13812), AAPASXX (SEQ ID NO: 13646):VPA:SPIS-AA¹⁷-LFI (SEQ ID NO: 13812), HVPKPXX (SEQ ID NO: 13652):APT:SPIS-AA¹⁷-LFI (SEQ ID NO: 13812), RVPSTXX (SEQ ID NO: 13659):APV:SPIS-AA¹⁷-LFI (SEQ ID NO: 13812), ASAAPXX (SEQ ID NO: 13647):VPQ:SPIS-AA¹⁷-LFI (SEQ ID NO: 13812), ASASPXX (SEQ ID NO: 13648):VSQ:SPIS-AA¹⁷-LFI (SEQ ID NO: 13812), ASASPXX (SEQ ID NO: 13648):VPQ:SPIS-AA¹⁷-LFI (SEQ ID NO: 13812), SSVKXQP (SEQ ID NO: 13661):SRV:SPIS-AA¹⁷-LFI (SEQ ID NO: 13812), RNVQXRP (SEQ ID NO: 13658):TQV:SPIS-AA¹⁷-LFI (SEQ ID NO: 13812), KIPKAXX (SEQ ID NO: 13655):APV:KPLS-AA¹⁷-LYV (SEQ ID NO: 13804), GIPEPXX (SEQ ID NO: 13650):APV:KPLS-AA¹⁷-LYV (SEQ ID NO: 13804), SIPKAXX (SEQ ID NO: 13660):APV:KPLS-AA¹⁷-LYV (SEQ ID NO: 13804), HVTKPTX (SEQ ID NO: 13653):APV:KPLS-AA¹⁷-LYV (SEQ ID NO: 13804), YVPKPXX (SEQ ID NO: 13664):APV:KPLS-AA¹⁷-LYV (SEQ ID NO: 13804), TVPKPXX (SEQ ID NO: 13663):APV:KPLS-AA¹⁷-LYV (SEQ ID NO: 13804), AVPKAXX (SEQ ID NO: 13649):APV:KPLS-AA¹⁷-LYV (SEQ ID NO: 13804), KVGKAXX (SEQ ID NO: 13656):APV:KPLS-AA¹⁷-LYV (SEQ ID NO: 13804), KASKAXX (SEQ ID NO: 13654):APV:KPLS-AA¹⁷-LYV (SEQ ID NO: 13804), GSAGPXX (SEQ ID NO: 13651):APV:KPLS-AA¹⁷-LYV (SEQ ID NO: 13804), AAPASXX (SEQ ID NO: 13646):APV:KPLS-AA¹⁷-LYV (SEQ ID NO: 13804), STPPTXX (SEQ ID NO: 13662):APV:KPLS-AA¹⁷-LYV (SEQ ID NO: 13804), HVPKPXX (SEQ ID NO: 13652):APV:KPLS-AA¹⁷-LYV (SEQ ID NO: 13804), ASAAPXX (SEQ ID NO: 13647):APV:KPLS-AA¹⁷-LYV (SEQ ID NO: 13804), ASASPXX (SEQ ID NO: 13648):APV:KPLS-AA¹⁷-LYV (SEQ ID NO: 13804), KIPKAXX (SEQ ID NO: 13655):VPT:KPLS-AA¹⁷-LYV (SEQ ID NO: 13804), GIPEPXX (SEQ ID NO: 13650):VPE:KPLS-AA¹⁷-LYV (SEQ ID NO: 13804), SIPKAXX (SEQ ID NO: 13660):VPT:KPLS-AA¹⁷-LYV (SEQ ID NO: 13804), HVTKPTX (SEQ ID NO: 13653):APT:KPLS-AA¹⁷-LYV (SEQ ID NO: 13804), YVPKPXX (SEQ ID NO: 13664):APT:KPLS-AA¹⁷-LYV (SEQ ID NO: 13804), TVPKPXX (SEQ ID NO: 13663):APT:KPLS-AA¹⁷-LYV (SEQ ID NO: 13804), AVPKAXX (SEQ ID NO: 13649):APT:KPLS-AA¹⁷-LYV (SEQ ID NO: 13804), KVGKAXX (SEQ ID NO: 13656):VPT:KPLS-AA¹⁷-LYV (SEQ ID NO: 13804), KASKAXX (SEQ ID NO: 13654):VPT:KPLS-AA¹⁷-LYV (SEQ ID NO: 13804), GSAGPXX (SEQ ID NO: 13651):TPT:KPLS-AA¹⁷-LYV (SEQ ID NO: 13804), AAPASXX (SEQ ID NO: 13646):VPA:KPLS-AA¹⁷-LYV (SEQ ID NO: 13804), STPPTXX (SEQ ID NO: 13662):VPT:KPLS-AA¹⁷-LYV (SEQ ID NO: 13804), HVPKPXX (SEQ ID NO: 13652):APT:KPLS-AA¹⁷-LYV (SEQ ID NO: 13804), ASAAPXX (SEQ ID NO: 13647):VPQ:KPLS-AA¹⁷-LYV (SEQ ID NO: 13804), ASASPXX (SEQ ID NO: 13648):VSQ:KPLS-AA¹⁷-LYV (SEQ ID NO: 13804), ASASPXX (SEQ ID NO: 13648):VPQ:KPLS-AA¹⁷-LYV (SEQ ID NO: 13804), NDEGLEX (SEQ ID NO: 13657):VPT:KPLS-AA¹⁷-LYV (SEQ ID NO: 13804), SSVKXQP (SEQ ID NO: 13661):SRV:KPLS-AA¹⁷-LYV (SEQ ID NO: 13804), RNVQXRP (SEQ ID NO: 13658):TQV:KPLS-AA¹⁷-LYV (SEQ ID NO: 13804), KIPKAXX (SEQ ID NO: 13655):VPQ:EPLP-AA¹⁷-VYY (SEQ ID NO: 13802), GIPEPXX (SEQ ID NO: 13650):VPQ:EPLP-AA¹⁷-VYY (SEQ ID NO: 13802), SIPKAXX (SEQ ID NO: 13660):VPQ:EPLP-AA¹⁷-VYY (SEQ ID NO: 13802), HVTKPTX (SEQ ID NO: 13653):VPQ:EPLP-AA¹⁷-VYY (SEQ ID NO: 13802), YVPKPXX (SEQ ID NO: 13664):VPQ:EPLP-AA¹⁷-VYY (SEQ ID NO: 13802), TVPKPXX (SEQ ID NO: 13663):VPQ:EPLP-AA¹⁷-VYY (SEQ ID NO: 13802), AVPKAXX (SEQ ID NO: 13649):VPQ:EPLP-AA¹⁷-VYY (SEQ ID NO: 13802), KVGKAXX (SEQ ID NO: 13656):VPQ:EPLP-AA¹⁷-VYY (SEQ ID NO: 13802), KASKAXX (SEQ ID NO: 13654):VPQ:EPLP-AA¹⁷-VYY (SEQ ID NO: 13802), GSAGPXX (SEQ ID NO: 13651):VPQ:EPLP-AA¹⁷-VYY (SEQ ID NO: 13802), AAPASXX (SEQ ID NO: 13646):VPQ:EPLP-AA¹⁷-VYY (SEQ ID NO: 13802), STPPTXX (SEQ ID NO: 13662):VPQ:EPLP-AA¹⁷-VYY (SEQ ID NO: 13802), HVPKPXX (SEQ ID NO: 13652):VPQ:EPLP-AA¹⁷-VYY (SEQ ID NO: 13802), RVPSTXX (SEQ ID NO: 13659):VPQ:EPLP-AA¹⁷-VYY (SEQ ID NO: 13802), ASASPXX (SEQ ID NO: 13648):VPQ:EPLP-AA¹⁷-VYY (SEQ ID NO: 13802), KIPKAXX (SEQ ID NO: 13655):VPT:EPLP-AA¹⁷-VYY (SEQ ID NO: 13802), GIPEPXX (SEQ ID NO: 13650):VPE:EPLP-AA¹⁷-VYY (SEQ ID NO: 13802), SIPKAXX (SEQ ID NO: 13660):VPT:EPLP-AA¹⁷-VYY (SEQ ID NO: 13802), HVTKPTX (SEQ ID NO: 13653):APT:EPLP-AA¹⁷-VYY (SEQ ID NO: 13802), YVPKPXX (SEQ ID NO: 13664):APT:EPLP-AA¹⁷-VYY (SEQ ID NO: 13802), TVPKPXX (SEQ ID NO: 13663):APT:EPLP-AA¹⁷-VYY (SEQ ID NO: 13802), AVPKAXX (SEQ ID NO: 13649):APT:EPLP-AA¹⁷-VYY (SEQ ID NO: 13802), KVGKAXX (SEQ ID NO: 13656):VPT:EPLP-AA¹⁷-VYY (SEQ ID NO: 13802), KASKAXX (SEQ ID NO: 13654):VPT:EPLP-AA¹⁷-VYY (SEQ ID NO: 13802), GSAGPXX (SEQ ID NO: 13651):TPT:EPLP-AA¹⁷-VYY (SEQ ID NO: 13802), AAPASXX (SEQ ID NO: 13646):VPA:EPLP-AA¹⁷-VYY (SEQ ID NO: 13802), STPPTXX (SEQ ID NO: 13662):VPT:EPLP-AA¹⁷-VYY (SEQ ID NO: 13802), HVPKPXX (SEQ ID NO: 13652):APT:EPLP-AA¹⁷-VYY (SEQ ID NO: 13802), RVPSTXX (SEQ ID NO: 13659):APV:EPLP-AA¹⁷-VYY (SEQ ID NO: 13802), ASASPXX (SEQ ID NO: 13648):VSQ:EPLP-AA¹⁷-VYY (SEQ ID NO: 13802), NDEGLEX (SEQ ID NO: 13657):VPT:EPLP-AA¹⁷-VYY (SEQ ID NO: 13802), SSVKXQP (SEQ ID NO: 13661):SRV:EPLP-AA¹⁷-VYY (SEQ ID NO: 13802), RNVQXRP (SEQ ID NO: 13658):TQV:EPLP-AA¹⁷-VYY (SEQ ID NO: 13802), KIPKAXX (SEQ ID NO: 13655):VSQ:EPLT-AA¹⁷-LYY (SEQ ID NO: 13803), GIPEPXX (SEQ ID NO: 13650):VSQ:EPLT-AA¹⁷-LYY (SEQ ID NO: 13803), SIPKAXX (SEQ ID NO: 13660):VSQ:EPLT-AA¹⁷-LYY (SEQ ID NO: 13803), HVTKPTX (SEQ ID NO: 13653):VSQ:EPLT-AA¹⁷-LYY (SEQ ID NO: 13803), YVPKPXX (SEQ ID NO: 13664):VSQ:EPLT-AA¹⁷-LYY (SEQ ID NO: 13803), TVPKPXX (SEQ ID NO: 13663):VSQ:EPLT-AA¹⁷-LYY (SEQ ID NO: 13803), AVPKAXX (SEQ ID NO: 13649):VSQ:EPLT-AA¹⁷-LYY (SEQ ID NO: 13803), KVGKAXX (SEQ ID NO: 13656):VSQ:EPLT-AA¹⁷-LYY (SEQ ID NO: 13803), KASKAXX (SEQ ID NO: 13654):VSQ:EPLT-AA¹⁷-LYY (SEQ ID NO: 13803), GSAGPXX (SEQ ID NO: 13651):VSQ:EPLT-AA¹⁷-LYY (SEQ ID NO: 13803), AAPASXX (SEQ ID NO: 13646):VSQ:EPLT-AA¹⁷-LYY (SEQ ID NO: 13803), STPPTXX (SEQ ID NO: 13662):VSQ:EPLT-AA¹⁷-LYY (SEQ ID NO: 13803), HVPKPXX (SEQ ID NO: 13652):VSQ:EPLT-AA¹⁷-LYY (SEQ ID NO: 13803), RVPSTXX (SEQ ID NO: 13659):VSQ:EPLT-AA¹⁷-LYY (SEQ ID NO: 13803), ASAAPXX (SEQ ID NO: 13647):VSQ:EPLT-AA¹⁷-LYY (SEQ ID NO: 13803), ASASPXX (SEQ ID NO: 13648):VSQ:EPLT-AA¹⁷-LYY (SEQ ID NO: 13803), KIPKAXX (SEQ ID NO: 13655):VPT:EPLT-AA¹⁷-LYY (SEQ ID NO: 13803), GIPEPXX (SEQ ID NO: 13650):VPE:EPLT-AA¹⁷-LYY (SEQ ID NO: 13803), SIPKAXX (SEQ ID NO: 13660):VPT:EPLT-AA¹⁷-LYY (SEQ ID NO: 13803), HVTKPTX (SEQ ID NO: 13653):APT:EPLT-AA¹⁷-LYY (SEQ ID NO: 13803), YVPKPXX (SEQ ID NO: 13664):APT:EPLT-AA¹⁷-LYY (SEQ ID NO: 13803), TVPKPXX (SEQ ID NO: 13663):APT:EPLT-AA¹⁷-LYY (SEQ ID NO: 13803), AVPKAXX (SEQ ID NO: 13649):APT:EPLT-AA¹⁷-LYY (SEQ ID NO: 13803), KVGKAXX (SEQ ID NO: 13656):VPT:EPLT-AA¹⁷-LYY (SEQ ID NO: 13803), KASKAXX (SEQ ID NO: 13654):VPT:EPLT-AA¹⁷-LYY (SEQ ID NO: 13803), GSAGPXX (SEQ ID NO: 13651):TPT:EPLT-AA¹⁷-LYY (SEQ ID NO: 13803), AAPASXX (SEQ ID NO: 13646):VPA:EPLT-AA¹⁷-LYY (SEQ ID NO: 13803), STPPTXX (SEQ ID NO: 13662):VPT:EPLT-AA¹⁷-LYY (SEQ ID NO: 13803), HVPKPXX (SEQ ID NO: 13652):APT:EPLT-AA¹⁷-LYY (SEQ ID NO: 13803), RVPSTXX (SEQ ID NO: 13659):APV:EPLT-AA¹⁷-LYY (SEQ ID NO: 13803), ASAAPXX (SEQ ID NO: 13647):VPQ:EPLT-AA¹⁷-LYY (SEQ ID NO: 13803), NDEGLEX (SEQ ID NO: 13657):VPT:EPLT-AA¹⁷-LYY (SEQ ID NO: 13803), SSVKXQP (SEQ ID NO: 13661):SRV:EPLT-AA¹⁷-LYY (SEQ ID NO: 13803), RNVQXRP (SEQ ID NO: 13658):TQV:EPLT-AA¹⁷-LYY (SEQ ID NO: 13803), KIPKAXX (SEQ ID NO: 13655):VPQ:EPLT-AA¹⁷-LYY (SEQ ID NO: 13803), GIPEPXX (SEQ ID NO: 13650):VPQ:EPLT-AA¹⁷-LYY (SEQ ID NO: 13803), SIPKAXX (SEQ ID NO: 13660):VPQ:EPLT-AA¹⁷-LYY (SEQ ID NO: 13803), HVTKPTX (SEQ ID NO: 13653):VPQ:EPLT-AA¹⁷-LYY (SEQ ID NO: 13803), YVPKPXX (SEQ ID NO: 13664):VPQ:EPLT-AA¹⁷-LYY (SEQ ID NO: 13803), TVPKPXX (SEQ ID NO: 13663):VPQ:EPLT-AA¹⁷-LYY (SEQ ID NO: 13803), AVPKAXX (SEQ ID NO: 13649):VPQ:EPLT-AA¹⁷-LYY (SEQ ID NO: 13803), KVGKAXX (SEQ ID NO: 13656):VPQ:EPLT-AA¹⁷-LYY (SEQ ID NO: 13803), KASKAXX (SEQ ID NO: 13654):VPQ:EPLT-AA¹⁷-LYY (SEQ ID NO: 13803), GSAGPXX (SEQ ID NO: 13651):VPQ:EPLT-AA¹⁷-LYY (SEQ ID NO: 13803), AAPASXX (SEQ ID NO: 13646):VPQ:EPLT-AA¹⁷-LYY (SEQ ID NO: 13803), STPPTXX (SEQ ID NO: 13662):VPQ:EPLT-AA¹⁷-LYY (SEQ ID NO: 13803), HVPKPXX (SEQ ID NO: 13652):VPQ:EPLT-AA¹⁷-LYY (SEQ ID NO: 13803), RVPSTXX (SEQ ID NO: 13659):VPQ:EPLT-AA¹⁷-LYY (SEQ ID NO: 13803), ASASPXX (SEQ ID NO: 13648):VPQ:EPLT-AA¹⁷-LYY (SEQ ID NO: 13803), NDEGLEX (SEQ ID NO: 13657):VPT:SNIT-AA¹⁷-QIM (SEQ ID NO: 13810), GIPEPXX (SEQ ID NO: 13650):VPE:SNIT-AA¹⁷-QIM (SEQ ID NO: 13810), HVTKPTX (SEQ ID NO: 13653):APT:SNIT-AA¹⁷-QIM (SEQ ID NO: 13810), YVPKPXX (SEQ ID NO: 13664):APT:SNIT-AA¹⁷-QIM (SEQ ID NO: 13810), TVPKPXX (SEQ ID NO: 13663):APT:SNIT-AA¹⁷-QIM (SEQ ID NO: 13810), AVPKAXX (SEQ ID NO: 13649):APT:SNIT-AA¹⁷-QIM (SEQ ID NO: 13810), GSAGPXX (SEQ ID NO: 13651):TPT:SNIT-AA¹⁷-QIM (SEQ ID NO: 13810), AAPASXX (SEQ ID NO: 13646):VPA:SNIT-AA¹⁷-QIM (SEQ ID NO: 13810), HVPKPXX (SEQ ID NO: 13652):APT:SNIT-AA¹⁷-QIM (SEQ ID NO: 13810), RVPSTXX (SEQ ID NO: 13659):APV:SNIT-AA¹⁷-QIM (SEQ ID NO: 13810), ASAAPXX (SEQ ID NO: 13647):VPQ:SNIT-AA¹⁷-QIM (SEQ ID NO: 13810), ASASPXX (SEQ ID NO: 13648):VSQ:SNIT-AA¹⁷-QIM (SEQ ID NO: 13810), ASASPXX (SEQ ID NO: 13648):VPQ:SNIT-AA¹⁷-QIM (SEQ ID NO: 13810), SSVKXQP (SEQ ID NO: 13661):SRV:SNIT-AA¹⁷-QIM (SEQ ID NO: 13810), RNVQXRP (SEQ ID NO: 13658):TQV:SNIT-AA¹⁷-QIM (SEQ ID NO: 13810), RNVQXRP (SEQ ID NO: 13658):SRV:RSVK-AA¹⁷-AKV (SEQ ID NO: 13807), KIPKAXX (SEQ ID NO: 13655):VPT:RSVK-AA¹⁷-AKV (SEQ ID NO: 13807), GIPEPXX (SEQ ID NO: 13650):VPE:RSVK-AA¹⁷-AKV (SEQ ID NO: 13807), SIPKAXX (SEQ ID NO: 13660):VPT:RSVK-AA¹⁷-AKV (SEQ ID NO: 13807), HVTKPTX (SEQ ID NO: 13653):APT:RSVK-AA¹⁷-AKV (SEQ ID NO: 13807), YVPKPXX (SEQ ID NO: 13664):APT:RSVK-AA¹⁷-AKV (SEQ ID NO: 13807), TVPKPXX (SEQ ID NO: 13663):APT:RSVK-AA¹⁷-AKV (SEQ ID NO: 13807), AVPKAXX (SEQ ID NO: 13649):APT:RSVK-AA¹⁷-AKV (SEQ ID NO: 13807), KVGKAXX (SEQ ID NO: 13656):VPT:RSVK-AA¹⁷-AKV (SEQ ID NO: 13807), KASKAXX (SEQ ID NO: 13654):VPT:RSVK-AA¹⁷-AKV (SEQ ID NO: 13807), GSAGPXX (SEQ ID NO: 13651):TPT:RSVK-AA¹⁷-AKV (SEQ ID NO: 13807), AAPASXX (SEQ ID NO: 13646):VPA:RSVK-AA¹⁷-AKV (SEQ ID NO: 13807), STPPTXX (SEQ ID NO: 13662):VPT:RSVK-AA¹⁷-AKV (SEQ ID NO: 13807), HVPKPXX (SEQ ID NO: 13652):APT:RSVK-AA¹⁷-AKV (SEQ ID NO: 13807), RVPSTXX (SEQ ID NO: 13659):APV:RSVK-AA¹⁷-AKV (SEQ ID NO: 13807), ASAAPXX (SEQ ID NO: 13647):VPQ:RSVK-AA¹⁷-AKV (SEQ ID NO: 13807), ASASPXX (SEQ ID NO: 13648):VSQ:RSVK-AA¹⁷-AKV (SEQ ID NO: 13807), ASASPXX (SEQ ID NO: 13648):VPQ:RSVK-AA¹⁷-AKV (SEQ ID NO: 13807), NDEGLEX (SEQ ID NO: 13657):VPT:RSVK-AA¹⁷-AKV (SEQ ID NO: 13807), RNVQXRP (SEQ ID NO: 13658):TQV:RSVK-AA¹⁷-AKV (SEQ ID NO: 13807), SSVKXQP (SEQ ID NO: 13661):TQV:RPVQ-AA¹⁷-RKI (SEQ ID NO: 13806), KIPKAXX (SEQ ID NO: 13655):VPT:RPVQ-AA¹⁷-RKI (SEQ ID NO: 13806), GIPEPXX (SEQ ID NO: 13650):VPE:RPVQ-AA¹⁷-RKI (SEQ ID NO: 13806), SIPKAXX (SEQ ID NO: 13660):VPT:RPVQ-AA¹⁷-RKI (SEQ ID NO: 13806), HVTKPTX (SEQ ID NO: 13653):APT:RPVQ-AA¹⁷-RKI (SEQ ID NO: 13806), YVPKPXX (SEQ ID NO: 13664):APT:RPVQ-AA¹⁷-RKI (SEQ ID NO: 13806), TVPKPXX (SEQ ID NO: 13663):APT:RPVQ-AA¹⁷-RKI (SEQ ID NO: 13806), AVPKAXX (SEQ ID NO: 13649):APT:RPVQ-AA¹⁷-RKI (SEQ ID NO: 13806), KVGKAXX (SEQ ID NO: 13656):VPT:RPVQ-AA¹⁷-RKI (SEQ ID NO: 13806), KASKAXX (SEQ ID NO: 13654):VPT:RPVQ-AA¹⁷-RKI (SEQ ID NO: 13806), GSAGPXX (SEQ ID NO: 13651):TPT:RPVQ-AA¹⁷-RKI (SEQ ID NO: 13806), AAPASXX (SEQ ID NO: 13646):VPA:RPVQ-AA¹⁷-RKI (SEQ ID NO: 13806), STPPTXX (SEQ ID NO: 13662):VPT:RPVQ-AA¹⁷-RKI (SEQ ID NO: 13806), HVPKPXX (SEQ ID NO: 13652):APT:RPVQ-AA¹⁷-RKI (SEQ ID NO: 13806), RVPSTXX (SEQ ID NO: 13659):APV:RPVQ-AA¹⁷-RKI (SEQ ID NO: 13806), ASAAPXX (SEQ ID NO: 13647):VPQ:RPVQ-AA¹⁷-RKI (SEQ ID NO: 13806), ASASPXX (SEQ ID NO: 13648):VSQ:RPVQ-AA¹⁷-RKI (SEQ ID NO: 13806), ASASPXX (SEQ ID NO: 13648):VPQ:RPVQ-AA¹⁷-RKI (SEQ ID NO: 13806), NDEGLEX (SEQ ID NO: 13657):VPT:RPVQ-AA¹⁷-RKI (SEQ ID NO: 13806) and SSVKXQP (SEQ ID NO: 13661):SRV:RPVQ-AA¹⁷-RKI (SEQ ID NO: 13806); and wherein AA¹⁷ is selected from the group consisting of G, A, V, L, I, P, F, M, W, T and S (in particular is selected from the group consisting of M, I, L, V and T).

[0311] In certain embodiments, the triplet PEP7:PEP5:PEP1 is selected from the group consisting of GIPEPXX (SEQ ID NO: 13650):VPTKM (SEQ ID NO: 13634):SAIS (SEQ ID NO: 13570), HVTKPTX (SEQ ID NO: 13653):VPTKL (SEQ ID NO: 13633):SAIS (SEQ ID NO: 13570), YVPKPXX (SEQ ID NO: 13664):VPTKL (SEQ ID NO: 13633):SAIS (SEQ ID NO: 13570), TVPKPXX (SEQ ID NO: 13663):VPTQL (SEQ ID NO: 13636):SAIS (SEQ ID NO: 13570), AVPKAXX (SEQ ID NO: 13649):VPTKL (SEQ ID NO: 13633):SAIS (SEQ ID NO: 13570), KVGKAXX (SEQ ID NO: 13656):VPTKL (SEQ ID NO: 13633):SAIS (SEQ ID NO: 13570), KASKAXX (SEQ ID NO: 13654):VPTKL (SEQ ID NO: 13633):SAIS (SEQ ID NO: 13570), GSAGPXX (SEQ ID NO: 13651):VPTKM (SEQ ID NO: 13634):SAIS (SEQ ID NO: 13570), AAPASXX (SEQ ID NO: 13646):VPTRL (SEQ ID NO: 13637):SAIS (SEQ ID NO: 13570), STPPTXX (SEQ ID NO: 13662):VPTRL (SEQ ID NO: 13637):SAIS (SEQ ID NO: 13570), HVPKPXX (SEQ ID NO: 13652):VPTKL (SEQ ID NO: 13633):SAIS (SEQ ID NO: 13570), RVPSTXX (SEQ ID NO: 13659):VPTKT (SEQ ID NO: 13635):SAIS (SEQ ID NO: 13570), ASAAPXX (SEQ ID NO: 13647):VPTAL (SEQ ID NO: 13628):SAIS (SEQ ID NO: 13570), ASASPXX (SEQ ID NO: 13648):VPTDL (SEQ ID NO: 13629):SAIS (SEQ ID NO: 13570), GIPEPXX (SEQ ID NO: 13650):VPEKM (SEQ ID NO: 13616):SAIS (SEQ ID NO: 13570), HVTKPTX (SEQ ID NO: 13653):APTKL (SEQ ID NO: 13579):SAIS (SEQ ID NO: 13570), YVPKPXX (SEQ ID NO: 13664):APTKL (SEQ ID NO: 13579):SAIS (SEQ ID NO: 13570), TVPKPXX (SEQ ID NO: 13663):APTQL (SEQ ID NO: 13582):SAIS (SEQ ID NO: 13570), AVPKAXX (SEQ ID NO: 13649):APTKL (SEQ ID NO: 13579):SAIS (SEQ ID NO: 13570), GSAGPXX (SEQ ID NO: 13651):TPTKM (SEQ ID NO: 13598):SAIS (SEQ ID NO: 13570), AAPASXX (SEQ ID NO: 13646):VPARL (SEQ ID NO: 13611):SAIS (SEQ ID NO: 13570), HVPKPXX (SEQ ID NO: 13652):APTKL (SEQ ID NO: 13579):SAIS (SEQ ID NO: 13570), RVPSTXX (SEQ ID NO: 13659):APVKT (SEQ ID NO: 13589):SAIS (SEQ ID NO: 13570), ASAAPXX (SEQ ID NO: 13647):VPQAL (SEQ ID NO: 13620):SAIS (SEQ ID NO: 13570), ASASPXX (SEQ ID NO: 13648):VSQDL (SEQ ID NO: 13639):SAIS (SEQ ID NO: 13570), ASASPXX (SEQ ID NO: 13648):VPQDL (SEQ ID NO: 13621):SAIS (SEQ ID NO: 13570), SSVKXQP (SEQ ID NO: 13661):SRVHH (SEQ ID NO: 13592):SAIS (SEQ ID NO: 13570), RNVQXRP (SEQ ID NO: 13658):TQVQL (SEQ ID NO: 13603):SAIS (SEQ ID NO: 13570), KIPKAXX (SEQ ID NO: 13655):VPEEL (SEQ ID NO: 13614):SSLS (SEQ ID NO: 13575), SIPKAXX (SEQ ID NO: 13660):VPEEL (SEQ ID NO: 13614):SSLS (SEQ ID NO: 13575), HVTKPTX (SEQ ID NO: 13653):VPEKL (SEQ ID NO: 13615):SSLS (SEQ ID NO: 13575), YVPKPXX (SEQ ID NO: 13664):VPEKL (SEQ ID NO: 13615):SSLS (SEQ ID NO: 13575), TVPKPXX (SEQ ID NO: 13663):VPEQL (SEQ ID NO: 13618):SSLS (SEQ ID NO: 13575), AVPKAXX (SEQ ID NO: 13649):VPEKL (SEQ ID NO: 13615):SSLS (SEQ ID NO: 13575), KVGKAXX (SEQ ID NO: 13656):VPEKL (SEQ ID NO: 13615):SSLS (SEQ ID NO: 13575), KASKAXX (SEQ ID NO: 13654):VPEKL (SEQ ID NO: 13615):SSLS (SEQ ID NO: 13575), GSAGPXX (SEQ ID NO: 13651):VPEKM (SEQ ID NO: 13616):SSLS (SEQ ID NO: 13575), AAPASXX (SEQ ID NO: 13646):VPERL (SEQ ID NO: 13619):SSLS (SEQ ID NO: 13575), STPPTXX (SEQ ID NO: 13662):VPERL (SEQ ID NO: 13619):SSLS (SEQ ID NO: 13575), HVPKPXX (SEQ ID NO: 13652):VPEKL (SEQ ID NO: 13615):SSLS (SEQ ID NO: 13575), RVPSTXX (SEQ ID NO: 13659):VPEKT (SEQ ID NO: 13617):SSLS (SEQ ID NO: 13575), ASAAPXX (SEQ ID NO: 13647):VPEAL (SEQ ID NO: 13612):SSLS (SEQ ID NO: 13575), ASASPXX (SEQ ID NO: 13648):VPEDL (SEQ ID NO: 13613):SSLS (SEQ ID NO: 13575), KIPKAXX (SEQ ID NO: 13655):VPTEL (SEQ ID NO: 13631):SSLS (SEQ ID NO: 13575), SIPKAXX (SEQ ID NO: 13660):VPTEL (SEQ ID NO: 13631):SSLS (SEQ ID NO: 13575), HVTKPTX (SEQ ID NO: 13653):APTKL (SEQ ID NO: 13579):SSLS (SEQ ID NO: 13575), YVPKPXX (SEQ ID NO: 13664):APTKL (SEQ ID NO: 13579):SSLS (SEQ ID NO: 13575), TVPKPXX (SEQ ID NO: 13663):APTQL (SEQ ID NO: 13582):SSLS (SEQ ID NO: 13575), AVPKAXX (SEQ ID NO: 13649):APTKL (SEQ ID NO: 13579):SSLS (SEQ ID NO: 13575), KVGKAXX (SEQ ID NO: 13656):VPTKL (SEQ ID NO: 13633):SSLS (SEQ ID NO: 13575), KASKAXX (SEQ ID NO: 13654):VPTKL (SEQ ID NO: 13633):SSLS (SEQ ID NO: 13575), GSAGPXX (SEQ ID NO: 13651):TPTKM (SEQ ID NO: 13598):SSLS (SEQ ID NO: 13575), AAPASXX (SEQ ID NO: 13646):VPARL (SEQ ID NO: 13611):SSLS (SEQ ID NO: 13575), STPPTXX (SEQ ID NO: 13662):VPTRL (SEQ ID NO: 13637):SSLS (SEQ ID NO: 13575), HVPKPXX (SEQ ID NO: 13652):APTKL (SEQ ID NO: 13579):SSLS (SEQ ID NO: 13575), RVPSTXX (SEQ ID NO: 13659):APVKT (SEQ ID NO: 13589):SSLS (SEQ ID NO: 13575), ASAAPXX (SEQ ID NO: 13647):VPQAL (SEQ ID NO: 13620):SSLS (SEQ ID NO: 13575), ASASPXX (SEQ ID NO: 13648):VSQDL (SEQ ID NO: 13639):SSLS (SEQ ID NO: 13575), ASASPXX (SEQ ID NO: 13648):VPQDL (SEQ ID NO: 13621):SSLS (SEQ ID NO: 13575), NDEGLEX (SEQ ID NO: 13657):VPTEE (SEQ ID NO: 13630):SSLS (SEQ ID NO: 13575), NDEGLEX (SEQ ID NO: 13657):VPTGQ (SEQ ID NO: 13632):SSLS (SEQ ID NO: 13575), SSVKXQP (SEQ ID NO: 13661):SRVHH (SEQ ID NO: 13592):SSLS (SEQ ID NO: 13575), RNVQXRP (SEQ ID NO: 13658):TQVQL (SEQ ID NO: 13603):SSLS (SEQ ID NO: 13575), KIPKAXX (SEQ ID NO: 13655):APTEL (SEQ ID NO: 13578):NAIS (SEQ ID NO: 13567), GIPEPXX (SEQ ID NO: 13650):APTKM (SEQ ID NO: 13580):NAIS (SEQ ID NO: 13567), SIPKAXX (SEQ ID NO: 13660):APTEL (SEQ ID NO: 13578):NAIS (SEQ ID NO: 13567), AVPKAXX (SEQ ID NO: 13649):APTKL (SEQ ID NO: 13579):NAIS (SEQ ID NO: 13567), KVGKAXX (SEQ ID NO: 13656):APTKL (SEQ ID NO: 13579):NAIS (SEQ ID NO: 13567), KASKAXX (SEQ ID NO: 13654):APTKL (SEQ ID NO: 13579):NAIS (SEQ ID NO: 13567), GSAGPXX (SEQ ID NO: 13651):APTKM (SEQ ID NO: 13580):NAIS (SEQ ID NO: 13567), AAPASXX (SEQ ID NO: 13646):APTRL (SEQ ID NO: 13583):NAIS (SEQ ID NO: 13567), STPPTXX (SEQ ID NO: 13662):APTRL (SEQ ID NO: 13583):NAIS (SEQ ID NO: 13567), RVPSTXX (SEQ ID NO: 13659):APTKT (SEQ ID NO: 13581):NAIS (SEQ ID NO: 13567), ASAAPXX (SEQ ID NO: 13647):APTAL (SEQ ID NO: 13576):NAIS (SEQ ID NO: 13567), ASASPXX (SEQ ID NO: 13648):APTDL (SEQ ID NO: 13577):NAIS (SEQ ID NO: 13567), KIPKAXX (SEQ ID NO: 13655):VPTEL (SEQ ID NO: 13631):NAIS (SEQ ID NO: 13567), GIPEPXX (SEQ ID NO: 13650):VPEKM (SEQ ID NO: 13616):NAIS (SEQ ID NO: 13567), SIPKAXX (SEQ ID NO: 13660):VPTEL (SEQ ID NO: 13631):NAIS (SEQ ID NO: 13567), KVGKAXX (SEQ ID NO: 13656):VPTKL (SEQ ID NO: 13633):NAIS (SEQ ID NO: 13567), KASKAXX (SEQ ID NO: 13654):VPTKL (SEQ ID NO: 13633):NAIS (SEQ ID NO: 13567), GSAGPXX (SEQ ID NO: 13651):TPTKM (SEQ ID NO: 13598):NAIS (SEQ ID NO: 13567), AAPASXX (SEQ ID NO: 13646):VPARL (SEQ ID NO: 13611):NAIS (SEQ ID NO: 13567), STPPTXX (SEQ ID NO: 13662):VPTRL (SEQ ID NO: 13637):NAIS (SEQ ID NO: 13567), RVPSTXX (SEQ ID NO: 13659):APVKT (SEQ ID NO: 13589):NAIS (SEQ ID NO: 13567), ASAAPXX (SEQ ID NO: 13647):VPQAL (SEQ ID NO: 13620):NAIS (SEQ ID NO: 13567), ASASPXX (SEQ ID NO: 13648):VSQDL (SEQ ID NO: 13639):NAIS (SEQ ID NO: 13567), ASASPXX (SEQ ID NO: 13648):VPQDL (SEQ ID NO: 13621):NAIS (SEQ ID NO: 13567), NDEGLEX (SEQ ID NO: 13657):VPTEE (SEQ ID NO: 13630):NAIS (SEQ ID NO: 13567), NDEGLEX (SEQ ID NO: 13657):VPTGQ (SEQ ID NO: 13632):NAIS (SEQ ID NO: 13567), SSVKXQP (SEQ ID NO: 13661):SRVHH (SEQ ID NO: 13592):NAIS (SEQ ID NO: 13567), RNVQXRP (SEQ ID NO: 13658):TQVQL (SEQ ID NO: 13603):NAIS (SEQ ID NO: 13567), KIPKAXX (SEQ ID NO: 13655):APTEL (SEQ ID NO: 13578):SATS (SEQ ID NO: 13571), GIPEPXX (SEQ ID NO: 13650):APTKM (SEQ ID NO: 13580):SATS (SEQ ID NO: 13571), SIPKAXX (SEQ ID NO: 13660):APTEL (SEQ ID NO: 13578):SATS (SEQ ID NO: 13571), HVTKPTX (SEQ ID NO: 13653):APTKL (SEQ ID NO: 13579):SATS (SEQ ID NO: 13571), YVPKPXX (SEQ ID NO: 13664):APTKL (SEQ ID NO: 13579):SATS (SEQ ID NO: 13571), TVPKPXX (SEQ ID NO: 13663):APTQL (SEQ ID NO: 13582):SATS (SEQ ID NO: 13571), KVGKAXX (SEQ ID NO: 13656):APTKL (SEQ ID NO: 13579):SATS (SEQ ID NO: 13571), KASKAXX (SEQ ID NO: 13654):APTKL (SEQ ID NO: 13579):SATS (SEQ ID NO: 13571), GSAGPXX (SEQ ID NO: 13651):APTKM (SEQ ID NO: 13580):SATS (SEQ ID NO: 13571), AAPASXX (SEQ ID NO: 13646):APTRL (SEQ ID NO: 13583):SATS (SEQ ID NO: 13571), STPPTXX (SEQ ID NO: 13662):APTRL (SEQ ID NO: 13583):SATS (SEQ ID NO: 13571), HVPKPXX (SEQ ID NO: 13652):APTKL (SEQ ID NO: 13579):SATS (SEQ ID NO: 13571), RVPSTXX (SEQ ID NO: 13659):APTKT (SEQ ID NO: 13581):SATS (SEQ ID NO: 13571), ASAAPXX (SEQ ID NO: 13647):APTAL (SEQ ID NO: 13576):SATS (SEQ ID NO: 13571), ASASPXX (SEQ ID NO: 13648):APTDL (SEQ ID NO: 13577):SATS (SEQ ID NO: 13571), KIPKAXX (SEQ ID NO: 13655):VPTEL (SEQ ID NO: 13631):SATS (SEQ ID NO: 13571), GIPEPXX (SEQ ID NO: 13650):VPEKM (SEQ ID NO: 13616):SATS (SEQ ID NO: 13571), SIPKAXX (SEQ ID NO: 13660):VPTEL (SEQ ID NO: 13631):SATS (SEQ ID NO: 13571), KVGKAXX (SEQ ID NO: 13656):VPTKL (SEQ ID NO: 13633):SATS (SEQ ID NO: 13571), KASKAXX (SEQ ID NO: 13654):VPTKL (SEQ ID NO: 13633):SATS (SEQ ID NO: 13571), GSAGPXX (SEQ ID NO: 13651):TPTKM (SEQ ID NO: 13598):SATS (SEQ ID NO: 13571), AAPASXX (SEQ ID NO: 13646):VPARL (SEQ ID NO: 13611):SATS (SEQ ID NO: 13571), STPPTXX (SEQ ID NO: 13662):VPTRL (SEQ ID NO: 13637):SATS (SEQ ID NO: 13571), RVPSTXX (SEQ ID NO: 13659):APVKT (SEQ ID NO: 13589):SATS (SEQ ID NO: 13571), ASAAPXX (SEQ ID NO: 13647):VPQAL (SEQ ID NO: 13620):SATS (SEQ ID NO: 13571), ASASPXX (SEQ ID NO: 13648):VSQDL (SEQ ID NO: 13639):SATS (SEQ ID NO: 13571), ASASPXX (SEQ ID NO: 13648):VPQDL (SEQ ID NO: 13621):SATS (SEQ ID NO: 13571), NDEGLEX (SEQ ID NO: 13657):VPTEE (SEQ ID NO: 13630):SATS (SEQ ID NO: 13571), NDEGLEX (SEQ ID NO: 13657):VPTGQ (SEQ ID NO: 13632):SATS (SEQ ID NO: 13571), SSVKXQP (SEQ ID NO: 13661):SRVHH (SEQ ID NO: 13592):SATS (SEQ ID NO: 13571), RNVQXRP (SEQ ID NO: 13658):TQVQL (SEQ ID NO: 13603):SATS (SEQ ID NO: 13571), KIPKAXX (SEQ ID NO: 13655):VPTEL (SEQ ID NO: 13631):SPIS (SEQ ID NO: 13574), GIPEPXX (SEQ ID NO: 13650):VPTKM (SEQ ID NO: 13634):SPIS (SEQ ID NO: 13574), SIPKAXX (SEQ ID NO: 13660):VPTEL (SEQ ID NO: 13631):SPIS (SEQ ID NO: 13574), HVTKPTX (SEQ ID NO: 13653):VPTKL (SEQ ID NO: 13633):SPIS (SEQ ID NO: 13574), YVPKPXX (SEQ ID NO: 13664):VPTKL (SEQ ID NO: 13633):SPIS (SEQ ID NO: 13574), TVPKPXX (SEQ ID NO: 13663):VPTQL (SEQ ID NO: 13636):SPIS (SEQ ID NO: 13574), AVPKAXX (SEQ ID NO: 13649):VPTKL (SEQ ID NO: 13633):SPIS (SEQ ID NO: 13574), KASKAXX (SEQ ID NO: 13654):VPTKL (SEQ ID NO: 13633):SPIS (SEQ ID NO: 13574), GSAGPXX (SEQ ID NO: 13651):VPTKM (SEQ ID NO: 13634):SPIS (SEQ ID NO: 13574), AAPASXX (SEQ ID NO: 13646):VPTRL (SEQ ID NO: 13637):SPIS (SEQ ID NO: 13574), STPPTXX (SEQ ID NO: 13662):VPTRL (SEQ ID NO: 13637):SPIS (SEQ ID NO: 13574), HVPKPXX (SEQ ID NO: 13652):VPTKL (SEQ ID NO: 13633):SPIS (SEQ ID NO: 13574), RVPSTXX (SEQ ID NO: 13659):VPTKT (SEQ ID NO: 13635):SPIS (SEQ ID NO: 13574), ASAAPXX (SEQ ID NO: 13647):VPTAL (SEQ ID NO: 13628):SPIS (SEQ ID NO: 13574), ASASPXX (SEQ ID NO: 13648):VPTDL (SEQ ID NO: 13629):SPIS (SEQ ID NO: 13574), GIPEPXX (SEQ ID NO: 13650):VPEKM (SEQ ID NO: 13616):SPIS (SEQ ID NO: 13574), HVTKPTX (SEQ ID NO: 13653):APTKL (SEQ ID NO: 13579):SPIS (SEQ ID NO: 13574), YVPKPXX (SEQ ID NO: 13664):APTKL (SEQ ID NO: 13579):SPIS (SEQ ID NO: 13574), TVPKPXX (SEQ ID NO: 13663):APTQL (SEQ ID NO: 13582):SPIS (SEQ ID NO: 13574), AVPKAXX (SEQ ID NO: 13649):APTKL (SEQ ID NO: 13579):SPIS (SEQ ID NO: 13574), GSAGPXX (SEQ ID NO: 13651):TPTKM (SEQ ID NO: 13598):SPIS (SEQ ID NO: 13574), AAPASXX (SEQ ID NO: 13646):VPARL (SEQ ID NO: 13611):SPIS (SEQ ID NO: 13574), HVPKPXX (SEQ ID NO: 13652):APTKL (SEQ ID NO: 13579):SPIS (SEQ ID NO: 13574), RVPSTXX (SEQ ID NO: 13659):APVKT (SEQ ID NO: 13589):SPIS (SEQ ID NO: 13574), ASAAPXX (SEQ ID NO: 13647):VPQAL (SEQ ID NO: 13620):SPIS (SEQ ID NO: 13574), ASASPXX (SEQ ID NO: 13648):VSQDL (SEQ ID NO: 13639):SPIS (SEQ ID NO: 13574), ASASPXX (SEQ ID NO: 13648):VPQDL (SEQ ID NO: 13621):SPIS (SEQ ID NO: 13574), SSVKXQP (SEQ ID NO: 13661):SRVHH (SEQ ID NO: 13592):SPIS (SEQ ID NO: 13574), RNVQXRP (SEQ ID NO: 13658):TQVQL (SEQ ID NO: 13603):SPIS (SEQ ID NO: 13574), KIPKAXX (SEQ ID NO: 13655):VPTEL (SEQ ID NO: 13631):EPIS (SEQ ID NO: 13563), GIPEPXX (SEQ ID NO: 13650):VPTKM (SEQ ID NO: 13634):EPIS (SEQ ID NO: 13563), SIPKAXX (SEQ ID NO: 13660):VPTEL (SEQ ID NO: 13631):EPIS (SEQ ID NO: 13563), HVTKPTX (SEQ ID NO: 13653):VPTKL (SEQ ID NO: 13633):EPIS (SEQ ID NO: 13563), YVPKPXX (SEQ ID NO: 13664):VPTKL (SEQ ID NO: 13633):EPIS (SEQ ID NO: 13563), TVPKPXX (SEQ ID NO: 13663):VPTQL (SEQ ID NO: 13636):EPIS (SEQ ID NO: 13563), AVPKAXX (SEQ ID NO: 13649):VPTKL (SEQ ID NO: 13633):EPIS (SEQ ID NO: 13563), KVGKAXX (SEQ ID NO: 13656):VPTKL (SEQ ID NO: 13633):EPIS (SEQ ID NO: 13563), GSAGPXX (SEQ ID NO: 13651):VPTKM (SEQ ID NO: 13634):EPIS (SEQ ID NO: 13563), AAPASXX (SEQ ID NO: 13646):VPTRL (SEQ ID NO: 13637):EPIS (SEQ ID NO: 13563), STPPTXX (SEQ ID NO: 13662):VPTRL (SEQ ID NO: 13637):EPIS (SEQ ID NO: 13563), HVPKPXX (SEQ ID NO: 13652):VPTKL (SEQ ID NO: 13633):EPIS (SEQ ID NO: 13563), RVPSTXX (SEQ ID NO: 13659):VPTKT (SEQ ID NO: 13635):EPIS (SEQ ID NO: 13563), ASAAPXX (SEQ ID NO: 13647):VPTAL (SEQ ID NO: 13628):EPIS (SEQ ID NO: 13563), ASASPXX (SEQ ID NO: 13648):VPTDL (SEQ ID NO: 13629):EPIS (SEQ ID NO: 13563), GIPEPXX (SEQ ID NO: 13650):VPEKM (SEQ ID NO: 13616):EPIS (SEQ ID NO: 13563), HVTKPTX (SEQ ID NO: 13653):APTKL (SEQ ID NO: 13579):EPIS (SEQ ID NO: 13563), YVPKPXX (SEQ ID NO: 13664):APTKL (SEQ ID NO: 13579):EPIS (SEQ ID NO: 13563), TVPKPXX (SEQ ID NO: 13663):APTQL (SEQ ID NO: 13582):EPIS (SEQ ID NO: 13563), AVPKAXX (SEQ ID NO: 13649):APTKL (SEQ ID NO: 13579):EPIS (SEQ ID NO: 13563), GSAGPXX (SEQ ID NO: 13651):TPTKM (SEQ ID NO: 13598):EPIS (SEQ ID NO: 13563), AAPASXX (SEQ ID NO: 13646):VPARL (SEQ ID NO: 13611):EPIS (SEQ ID NO: 13563), HVPKPXX (SEQ ID NO: 13652):APTKL (SEQ ID NO: 13579):EPIS (SEQ ID NO: 13563), RVPSTXX (SEQ ID NO: 13659):APVKT (SEQ ID NO: 13589):EPIS (SEQ ID NO: 13563), ASAAPXX (SEQ ID NO: 13647):VPQAL (SEQ ID NO: 13620):EPIS (SEQ ID NO: 13563), ASASPXX (SEQ ID NO: 13648):VSQDL (SEQ ID NO: 13639):EPIS (SEQ ID NO: 13563), ASASPXX (SEQ ID NO: 13648):VPQDL (SEQ ID NO: 13621):EPIS (SEQ ID NO: 13563), SSVKXQP (SEQ ID NO: 13661):SRVHH (SEQ ID NO: 13592):EPIS (SEQ ID NO: 13563), RNVQXRP (SEQ ID NO: 13658):TQVQL (SEQ ID NO: 13603):EPIS (SEQ ID NO: 13563), KIPKAXX (SEQ ID NO: 13655):TPTEL (SEQ ID NO: 13596):SPIN (SEQ ID NO: 13573), GIPEPXX (SEQ ID NO: 13650):TPTKM (SEQ ID NO: 13598):SPIN (SEQ ID NO: 13573), SIPKAXX (SEQ ID NO: 13660):TPTEL (SEQ ID NO: 13596):SPIN (SEQ ID NO: 13573), HVTKPTX (SEQ ID NO: 13653):TPTKL (SEQ ID NO: 13597):SPIN (SEQ ID NO: 13573), YVPKPXX (SEQ ID NO: 13664):TPTKL (SEQ ID NO: 13597):SPIN (SEQ ID NO: 13573), TVPKPXX (SEQ ID NO: 13663):TPTQL (SEQ ID NO: 13600):SPIN (SEQ ID NO: 13573), AVPKAXX (SEQ ID NO: 13649):TPTKL (SEQ ID NO: 13597):SPIN (SEQ ID NO: 13573), KVGKAXX (SEQ ID NO: 13656):TPTKL (SEQ ID NO: 13597):SPIN (SEQ ID NO: 13573), KASKAXX (SEQ ID NO: 13654):TPTKL (SEQ ID NO: 13597):SPIN (SEQ ID NO: 13573), AAPASXX (SEQ ID NO: 13646):TPTRL (SEQ ID NO: 13601):SPIN (SEQ ID NO: 13573), STPPTXX (SEQ ID NO: 13662):TPTRL (SEQ ID NO: 13601):SPIN (SEQ ID NO: 13573), HVPKPXX (SEQ ID NO: 13652):TPTKL (SEQ ID NO: 13597):SPIN (SEQ ID NO: 13573), RVPSTXX (SEQ ID NO: 13659):TPTKT (SEQ ID NO: 13599):SPIN (SEQ ID NO: 13573), ASAAPXX (SEQ ID NO: 13647):TPTAL (SEQ ID NO: 13594):SPIN (SEQ ID NO: 13573), ASASPXX (SEQ ID NO: 13648):TPTDL (SEQ ID NO: 13595):SPIN (SEQ ID NO: 13573), KIPKAXX (SEQ ID NO: 13655):VPTEL (SEQ ID NO: 13631):SPIN (SEQ ID NO: 13573), GIPEPXX (SEQ ID NO: 13650):VPEKM (SEQ ID NO: 13616):SPIN (SEQ ID NO: 13573), SIPKAXX (SEQ ID NO: 13660):VPTEL (SEQ ID NO: 13631):SPIN (SEQ ID NO: 13573), HVTKPTX (SEQ ID NO: 13653):APTKL (SEQ ID NO: 13579):SPIN (SEQ ID NO: 13573), YVPKPXX (SEQ ID NO: 13664):APTKL (SEQ ID NO: 13579):SPIN (SEQ ID NO: 13573), TVPKPXX (SEQ ID NO: 13663):APTQL (SEQ ID NO: 13582):SPIN (SEQ ID NO: 13573), AVPKAXX (SEQ ID NO: 13649):APTKL (SEQ ID NO: 13579):SPIN (SEQ ID NO: 13573), KVGKAXX (SEQ ID NO: 13656):VPTKL (SEQ ID NO: 13633):SPIN (SEQ ID NO: 13573), KASKAXX (SEQ ID NO: 13654):VPTKL (SEQ ID NO: 13633):SPIN (SEQ ID NO: 13573), AAPASXX (SEQ ID NO: 13646):VPARL (SEQ ID NO: 13611):SPIN (SEQ ID NO: 13573), STPPTXX (SEQ ID NO: 13662):VPTRL (SEQ ID NO: 13637):SPIN (SEQ ID NO: 13573), HVPKPXX (SEQ ID NO: 13652):APTKL (SEQ ID NO: 13579):SPIN (SEQ ID NO: 13573), RVPSTXX (SEQ ID NO: 13659):APVKT (SEQ ID NO: 13589):SPIN (SEQ ID NO: 13573), ASAAPXX (SEQ ID NO: 13647):VPQAL (SEQ ID NO: 13620):SPIN (SEQ ID NO: 13573), ASASPXX (SEQ ID NO: 13648):VSQDL (SEQ ID NO: 13639):SPIN (SEQ ID NO: 13573), ASASPXX (SEQ ID NO: 13648):VPQDL (SEQ ID NO: 13621):SPIN (SEQ ID NO: 13573), NDEGLEX (SEQ ID NO: 13657):VPTEE (SEQ ID NO: 13630):SPIN (SEQ ID NO: 13573), NDEGLEX (SEQ ID NO: 13657):VPTGQ (SEQ ID NO: 13632):SPIN (SEQ ID NO: 13573), SSVKXQP (SEQ ID NO: 13661):SRVHH (SEQ ID NO: 13592):SPIN (SEQ ID NO: 13573), RNVQXRP (SEQ ID NO: 13658):TQVQL (SEQ ID NO: 13603):SPIN (SEQ ID NO: 13573), KIPKAXX (SEQ ID NO: 13655):VPAEL (SEQ ID NO: 13606):SPIS (SEQ ID NO: 13574), GIPEPXX (SEQ ID NO: 13650):VPAKM (SEQ ID NO: 13608):SPIS (SEQ ID NO: 13574), SIPKAXX (SEQ ID NO: 13660):VPAEL (SEQ ID NO: 13606):SPIS (SEQ ID NO: 13574), HVTKPTX (SEQ ID NO: 13653):VPAKL (SEQ ID NO: 13607):SPIS (SEQ ID NO: 13574), YVPKPXX (SEQ ID NO: 13664):VPAKL (SEQ ID NO: 13607):SPIS (SEQ ID NO: 13574), TVPKPXX (SEQ ID NO: 13663):VPAQL (SEQ ID NO: 13610):SPIS (SEQ ID NO: 13574), AVPKAXX (SEQ ID NO: 13649):VPAKL (SEQ ID NO: 13607):SPIS (SEQ ID NO: 13574), KVGKAXX (SEQ ID NO: 13656):VPAKL (SEQ ID NO: 13607):SPIS (SEQ ID NO: 13574), KASKAXX (SEQ ID NO: 13654):VPAKL (SEQ ID NO: 13607):SPIS (SEQ ID NO: 13574), GSAGPXX (SEQ ID NO: 13651):VPAKM (SEQ ID NO: 13608):SPIS (SEQ ID NO: 13574), STPPTXX (SEQ ID NO: 13662):VPARL (SEQ ID NO: 13611):SPIS (SEQ ID NO: 13574), HVPKPXX (SEQ ID NO: 13652):VPAKL (SEQ ID NO: 13607):SPIS (SEQ ID NO: 13574), RVPSTXX (SEQ ID NO: 13659):VPAKT (SEQ ID NO: 13609):SPIS (SEQ ID NO: 13574), ASAAPXX (SEQ ID NO: 13647):VPAAL (SEQ ID NO: 13604):SPIS (SEQ ID NO: 13574), ASASPXX (SEQ ID NO: 13648):VPADL (SEQ ID NO: 13605):SPIS (SEQ ID NO: 13574), KVGKAXX (SEQ ID NO: 13656):VPTKL (SEQ ID NO: 13633):SPIS (SEQ ID NO: 13574), NDEGLEX (SEQ ID NO: 13657):VPTEE (SEQ ID NO: 13630):SPIS (SEQ ID NO: 13574), NDEGLEX (SEQ ID NO: 13657):VPTGQ (SEQ ID NO: 13632):SPIS (SEQ ID NO: 13574), KIPKAXX (SEQ ID NO: 13655):APVEL (SEQ ID NO: 13586):KPLS (SEQ ID NO: 13566), GIPEPXX (SEQ ID NO: 13650):APVKM (SEQ ID NO: 13588):KPLS (SEQ ID NO: 13566), SIPKAXX (SEQ ID NO: 13660):APVEL (SEQ ID NO: 13586):KPLS (SEQ ID NO: 13566), HVTKPTX (SEQ ID NO: 13653):APVKL (SEQ ID NO: 13587):KPLS (SEQ ID NO: 13566), YVPKPXX (SEQ ID NO: 13664):APVKL (SEQ ID NO: 13587):KPLS (SEQ ID NO: 13566), TVPKPXX (SEQ ID NO: 13663):APVQL (SEQ ID NO: 13590):KPLS (SEQ ID NO: 13566), AVPKAXX (SEQ ID NO: 13649):APVKL (SEQ ID NO: 13587):KPLS (SEQ ID NO: 13566), KVGKAXX (SEQ ID NO: 13656):APVKL (SEQ ID NO: 13587):KPLS (SEQ ID NO: 13566), KASKAXX (SEQ ID NO: 13654):APVKL (SEQ ID NO: 13587):KPLS (SEQ ID NO: 13566), GSAGPXX (SEQ ID NO: 13651):APVKM (SEQ ID NO: 13588):KPLS (SEQ ID NO: 13566), AAPASXX (SEQ ID NO: 13646):APVRL (SEQ ID NO: 13591):KPLS (SEQ ID NO: 13566), STPPTXX (SEQ ID NO: 13662):APVRL (SEQ ID NO: 13591):KPLS (SEQ ID NO: 13566), HVPKPXX (SEQ ID NO: 13652):APVKL (SEQ ID NO: 13587):KPLS (SEQ ID NO: 13566), ASAAPXX (SEQ ID NO: 13647):APVAL (SEQ ID NO: 13584):KPLS (SEQ ID NO: 13566), ASASPXX (SEQ ID NO: 13648):APVDL (SEQ ID NO: 13585):KPLS (SEQ ID NO: 13566), KIPKAXX (SEQ ID NO: 13655):VPTEL (SEQ ID NO: 13631):KPLS (SEQ ID NO: 13566), GIPEPXX (SEQ ID NO: 13650):VPEKM (SEQ ID NO: 13616):KPLS (SEQ ID NO: 13566), SIPKAXX (SEQ ID NO: 13660):VPTEL (SEQ ID NO: 13631):KPLS (SEQ ID NO: 13566), HVTKPTX (SEQ ID NO: 13653):APTKL (SEQ ID NO: 13579):KPLS (SEQ ID NO: 13566), YVPKPXX (SEQ ID NO: 13664):APTKL (SEQ ID NO: 13579):KPLS (SEQ ID NO: 13566), TVPKPXX (SEQ ID NO: 13663):APTQL (SEQ ID NO: 13582):KPLS (SEQ ID NO: 13566), AVPKAXX (SEQ ID NO: 13649):APTKL (SEQ ID NO: 13579):KPLS (SEQ ID NO: 13566), KVGKAXX (SEQ ID NO: 13656):VPTKL (SEQ ID NO: 13633):KPLS (SEQ ID NO: 13566), KASKAXX (SEQ ID NO: 13654):VPTKL (SEQ ID NO: 13633):KPLS (SEQ ID NO: 13566), GSAGPXX (SEQ ID NO: 13651):TPTKM (SEQ ID NO: 13598):KPLS (SEQ ID NO: 13566), AAPASXX (SEQ ID NO: 13646):VPARL (SEQ ID NO: 13611):KPLS (SEQ ID NO: 13566), STPPTXX (SEQ ID NO: 13662):VPTRL (SEQ ID NO: 13637):KPLS (SEQ ID NO: 13566), HVPKPXX (SEQ ID NO: 13652):APTKL (SEQ ID NO: 13579):KPLS (SEQ ID NO: 13566), ASAAPXX (SEQ ID NO: 13647):VPQAL (SEQ ID NO: 13620):KPLS (SEQ ID NO: 13566), ASASPXX (SEQ ID NO: 13648):VSQDL (SEQ ID NO: 13639):KPLS (SEQ ID NO: 13566), ASASPXX (SEQ ID NO: 13648):VPQDL (SEQ ID NO: 13621):KPLS (SEQ ID NO: 13566), NDEGLEX (SEQ ID NO: 13657):VPTEE (SEQ ID NO: 13630):KPLS (SEQ ID NO: 13566), NDEGLEX (SEQ ID NO: 13657):VPTGQ (SEQ ID NO: 13632):KPLS (SEQ ID NO: 13566), SSVKXQP (SEQ ID NO: 13661):SRVHH (SEQ ID NO: 13592):KPLS (SEQ ID NO: 13566), RNVQXRP (SEQ ID NO: 13658):TQVQL (SEQ ID NO: 13603):KPLS (SEQ ID NO: 13566), KIPKAXX (SEQ ID NO: 13655):VPQEL (SEQ ID NO: 13622):EPLP (SEQ ID NO: 13564), GIPEPXX (SEQ ID NO: 13650):VPQKM (SEQ ID NO: 13624):EPLP (SEQ ID NO: 13564), SIPKAXX (SEQ ID NO: 13660):VPQEL (SEQ ID NO: 13622):EPLP (SEQ ID NO: 13564), HVTKPTX (SEQ ID NO: 13653):VPQKL (SEQ ID NO: 13623):EPLP (SEQ ID NO: 13564), YVPKPXX (SEQ ID NO: 13664):VPQKL (SEQ ID NO: 13623):EPLP (SEQ ID NO: 13564), TVPKPXX (SEQ ID NO: 13663):VPQQL (SEQ ID NO: 13626):EPLP (SEQ ID NO: 13564), AVPKAXX (SEQ ID NO: 13649):VPQKL (SEQ ID NO: 13623):EPLP (SEQ ID NO: 13564), KVGKAXX (SEQ ID NO: 13656):VPQKL (SEQ ID NO: 13623):EPLP (SEQ ID NO: 13564), KASKAXX (SEQ ID NO: 13654):VPQKL (SEQ ID NO: 13623):EPLP (SEQ ID NO: 13564), GSAGPXX (SEQ ID NO: 13651):VPQKM (SEQ ID NO: 13624):EPLP (SEQ ID NO: 13564), AAPASXX (SEQ ID NO: 13646):VPQRL (SEQ ID NO: 13627):EPLP (SEQ ID NO: 13564), STPPTXX (SEQ ID NO: 13662):VPQRL (SEQ ID NO: 13627):EPLP (SEQ ID NO: 13564), HVPKPXX (SEQ ID NO: 13652):VPQKL (SEQ ID NO: 13623):EPLP (SEQ ID NO: 13564), RVPSTXX (SEQ ID NO: 13659):VPQKT (SEQ ID NO: 13625):EPLP (SEQ ID NO: 13564), ASASPXX (SEQ ID NO: 13648):VPQDL (SEQ ID NO: 13621):EPLP (SEQ ID NO: 13564), KIPKAXX (SEQ ID NO: 13655):VPTEL (SEQ ID NO: 13631):EPLP (SEQ ID NO: 13564), GIPEPXX (SEQ ID NO: 13650):VPEKM (SEQ ID NO: 13616):EPLP (SEQ ID NO: 13564), SIPKAXX (SEQ ID NO: 13660):VPTEL (SEQ ID NO: 13631):EPLP (SEQ ID NO: 13564), HVTKPTX (SEQ ID NO: 13653):APTKL (SEQ ID NO: 13579):EPLP (SEQ ID NO: 13564), YVPKPXX (SEQ ID NO: 13664):APTKL (SEQ ID NO: 13579):EPLP (SEQ ID NO: 13564), TVPKPXX (SEQ ID NO: 13663):APTQL (SEQ ID NO: 13582):EPLP (SEQ ID NO: 13564), AVPKAXX (SEQ ID NO: 13649):APTKL (SEQ ID NO: 13579):EPLP (SEQ ID NO: 13564), KVGKAXX (SEQ ID NO: 13656):VPTKL (SEQ ID NO: 13633):EPLP (SEQ ID NO: 13564), KASKAXX (SEQ ID NO: 13654):VPTKL (SEQ ID NO: 13633):EPLP (SEQ ID NO: 13564), GSAGPXX (SEQ ID NO: 13651):TPTKM (SEQ ID NO: 13598):EPLP (SEQ ID NO: 13564), AAPASXX (SEQ ID NO: 13646):VPARL (SEQ ID NO: 13611):EPLP (SEQ ID NO: 13564), STPPTXX (SEQ ID NO: 13662):VPTRL (SEQ ID NO: 13637):EPLP (SEQ ID NO: 13564), HVPKPXX (SEQ ID NO: 13652):APTKL (SEQ ID NO: 13579):EPLP (SEQ ID NO: 13564), RVPSTXX (SEQ ID NO: 13659):APVKT (SEQ ID NO: 13589):EPLP (SEQ ID NO: 13564), ASASPXX (SEQ ID NO: 13648):VSQDL (SEQ ID NO: 13639):EPLP (SEQ ID NO: 13564), NDEGLEX (SEQ ID NO: 13657):VPTEE (SEQ ID NO: 13630):EPLP (SEQ ID NO: 13564), NDEGLEX (SEQ ID NO: 13657):VPTGQ (SEQ ID NO: 13632):EPLP (SEQ ID NO: 13564), SSVKXQP (SEQ ID NO: 13661):SRVHH (SEQ ID NO: 13592):EPLP (SEQ ID NO: 13564), RNVQXRP (SEQ ID NO: 13658):TQVQL (SEQ ID NO: 13603):EPLP (SEQ ID NO: 13564), KIPKAXX (SEQ ID NO: 13655):VSQEL (SEQ ID NO: 13640):EPLT (SEQ ID NO: 13565), GIPEPXX (SEQ ID NO: 13650):VSQKM (SEQ ID NO: 13642):EPLT (SEQ ID NO: 13565), SIPKAXX (SEQ ID NO: 13660):VSQEL (SEQ ID NO: 13640):EPLT (SEQ ID NO: 13565), HVTKPTX (SEQ ID NO: 13653):VSQKL (SEQ ID NO: 13641):EPLT (SEQ ID NO: 13565), YVPKPXX (SEQ ID NO: 13664):VSQKL (SEQ ID NO: 13641):EPLT (SEQ ID NO: 13565), TVPKPXX (SEQ ID NO: 13663):VSQQL (SEQ ID NO: 13644):EPLT (SEQ ID NO: 13565), AVPKAXX (SEQ ID NO: 13649):VSQKL (SEQ ID NO: 13641):EPLT (SEQ ID NO: 13565), KVGKAXX (SEQ ID NO: 13656):VSQKL (SEQ ID NO: 13641):EPLT (SEQ ID NO: 13565), KASKAXX (SEQ ID NO: 13654):VSQKL (SEQ ID NO: 13641):EPLT (SEQ ID NO: 13565), GSAGPXX (SEQ ID NO: 13651):VSQKM (SEQ ID NO: 13642):EPLT (SEQ ID NO: 13565), AAPASXX (SEQ ID NO: 13646):VSQRL (SEQ ID NO: 13645):EPLT (SEQ ID NO: 13565), STPPTXX (SEQ ID NO: 13662):VSQRL (SEQ ID NO: 13645):EPLT (SEQ ID NO: 13565), HVPKPXX (SEQ ID NO: 13652):VSQKL (SEQ ID NO: 13641):EPLT (SEQ ID NO: 13565), RVPSTXX (SEQ ID NO: 13659):VSQKT (SEQ ID NO: 13643):EPLT (SEQ ID NO: 13565), ASAAPXX (SEQ ID NO: 13647):VSQAL (SEQ ID NO: 13638):EPLT (SEQ ID NO: 13565), ASASPXX (SEQ ID NO: 13648):VSQDL (SEQ ID NO: 13639):EPLT (SEQ ID NO: 13565), KIPKAXX (SEQ ID NO: 13655):VPTEL (SEQ ID NO: 13631):EPLT (SEQ ID NO: 13565), GIPEPXX (SEQ ID NO: 13650):VPEKM (SEQ ID NO: 13616):EPLT (SEQ ID NO: 13565), SIPKAXX (SEQ ID NO: 13660):VPTEL (SEQ ID NO: 13631):EPLT (SEQ ID NO: 13565), HVTKPTX (SEQ ID NO: 13653):APTKL (SEQ ID NO: 13579):EPLT (SEQ ID NO: 13565), YVPKPXX (SEQ ID NO: 13664):APTKL (SEQ ID NO: 13579):EPLT (SEQ ID NO: 13565), TVPKPXX (SEQ ID NO: 13663):APTQL (SEQ ID NO: 13582):EPLT (SEQ ID NO: 13565), AVPKAXX (SEQ ID NO: 13649):APTKL (SEQ ID NO: 13579):EPLT (SEQ ID NO: 13565), KVGKAXX (SEQ ID NO: 13656):VPTKL (SEQ ID NO: 13633):EPLT (SEQ ID NO: 13565), KASKAXX (SEQ ID NO: 13654):VPTKL (SEQ ID NO: 13633):EPLT (SEQ ID NO: 13565), GSAGPXX (SEQ ID NO: 13651):TPTKM (SEQ ID NO: 13598):EPLT (SEQ ID NO: 13565), AAPASXX (SEQ ID NO: 13646):VPARL (SEQ ID NO: 13611):EPLT (SEQ ID NO: 13565), STPPTXX (SEQ ID NO: 13662):VPTRL (SEQ ID NO: 13637):EPLT (SEQ ID NO: 13565), HVPKPXX (SEQ ID NO: 13652):APTKL (SEQ ID NO: 13579):EPLT (SEQ ID NO: 13565), RVPSTXX (SEQ ID NO: 13659):APVKT (SEQ ID NO: 13589):EPLT (SEQ ID NO: 13565), ASAAPXX (SEQ ID NO: 13647):VPQAL (SEQ ID NO: 13620):EPLT (SEQ ID NO: 13565), NDEGLEX (SEQ ID NO: 13657):VPTEE (SEQ ID NO: 13630):EPLT (SEQ ID NO: 13565), NDEGLEX (SEQ ID NO: 13657):VPTGQ (SEQ ID NO: 13632):EPLT (SEQ ID NO: 13565), SSVKXQP (SEQ ID NO: 13661):SRVHH (SEQ ID NO: 13592):EPLT (SEQ ID NO: 13565), RNVQXRP (SEQ ID NO: 13658):TQVQL (SEQ ID NO: 13603):EPLT (SEQ ID NO: 13565), KIPKAXX (SEQ ID NO: 13655):VPQEL (SEQ ID NO: 13622):EPLT (SEQ ID NO: 13565), GIPEPXX (SEQ ID NO: 13650):VPQKM (SEQ ID NO: 13624):EPLT (SEQ ID NO: 13565), SIPKAXX (SEQ ID NO: 13660):VPQEL (SEQ ID NO: 13622):EPLT (SEQ ID NO: 13565), HVTKPTX (SEQ ID NO: 13653):VPQKL (SEQ ID NO: 13623):EPLT (SEQ ID NO: 13565), YVPKPXX (SEQ ID NO: 13664):VPQKL (SEQ ID NO: 13623):EPLT (SEQ ID NO: 13565), TVPKPXX (SEQ ID NO: 13663):VPQQL (SEQ ID NO: 13626):EPLT (SEQ ID NO: 13565), AVPKAXX (SEQ ID NO: 13649):VPQKL (SEQ ID NO: 13623):EPLT (SEQ ID NO: 13565), KVGKAXX (SEQ ID NO: 13656):VPQKL (SEQ ID NO: 13623):EPLT (SEQ ID NO: 13565), KASKAXX (SEQ ID NO: 13654):VPQKL (SEQ ID NO: 13623):EPLT (SEQ ID NO: 13565), GSAGPXX (SEQ ID NO: 13651):VPQKM (SEQ ID NO: 13624):EPLT (SEQ ID NO: 13565), AAPASXX (SEQ ID NO: 13646):VPQRL (SEQ ID NO: 13627):EPLT (SEQ ID NO: 13565), STPPTXX (SEQ ID NO: 13662):VPQRL (SEQ ID NO: 13627):EPLT (SEQ ID NO: 13565), HVPKPXX (SEQ ID NO: 13652):VPQKL (SEQ ID NO: 13623):EPLT (SEQ ID NO: 13565), RVPSTXX (SEQ ID NO: 13659):VPQKT (SEQ ID NO: 13625):EPLT (SEQ ID NO: 13565), ASASPXX (SEQ ID NO: 13648):VPQDL (SEQ ID NO: 13621):EPLT (SEQ ID NO: 13565), NDEGLEX (SEQ ID NO: 13657):VPTGQ (SEQ ID NO: 13632):SNIT (SEQ ID NO: 13572), GIPEPXX (SEQ ID NO: 13650):VPEKM (SEQ ID NO: 13616):SNIT (SEQ ID NO: 13572), HVTKPTX (SEQ ID NO: 13653):APTKL (SEQ ID NO: 13579):SNIT (SEQ ID NO: 13572), YVPKPXX (SEQ ID NO: 13664):APTKL (SEQ ID NO: 13579):SNIT (SEQ ID NO: 13572), TVPKPXX (SEQ ID NO: 13663):APTQL (SEQ ID NO: 13582):SNIT (SEQ ID NO: 13572), AVPKAXX (SEQ ID NO: 13649):APTKL (SEQ ID NO: 13579):SNIT (SEQ ID NO: 13572), GSAGPXX (SEQ ID NO: 13651):TPTKM (SEQ ID NO: 13598):SNIT (SEQ ID NO: 13572), AAPASXX (SEQ ID NO: 13646):VPARL (SEQ ID NO: 13611):SNIT (SEQ ID NO: 13572), HVPKPXX (SEQ ID NO: 13652):APTKL (SEQ ID NO: 13579):SNIT (SEQ ID NO: 13572), RVPSTXX (SEQ ID NO: 13659):APVKT (SEQ ID NO: 13589):SNIT (SEQ ID NO: 13572), ASAAPXX (SEQ ID NO: 13647):VPQAL (SEQ ID NO: 13620):SNIT (SEQ ID NO: 13572), ASASPXX (SEQ ID NO: 13648):VSQDL (SEQ ID NO: 13639):SNIT (SEQ ID NO: 13572), ASASPXX (SEQ ID NO: 13648):VPQDL (SEQ ID NO: 13621):SNIT (SEQ ID NO: 13572), SSVKXQP (SEQ ID NO: 13661):SRVHH (SEQ ID NO: 13592):SNIT (SEQ ID NO: 13572), RNVQXRP (SEQ ID NO: 13658):TQVQL (SEQ ID NO: 13603):SNIT (SEQ ID NO: 13572), RNVQXRP (SEQ ID NO: 13658):SRVQL (SEQ ID NO: 13593):RSVK (SEQ ID NO: 13569), KIPKAXX (SEQ ID NO: 13655):VPTEL (SEQ ID NO: 13631):RSVK (SEQ ID NO: 13569), GIPEPXX (SEQ ID NO: 13650):VPEKM (SEQ ID NO: 13616):RSVK (SEQ ID NO: 13569), SIPKAXX (SEQ ID NO: 13660):VPTEL (SEQ ID NO: 13631):RSVK (SEQ ID NO: 13569), HVTKPTX (SEQ ID NO: 13653):APTKL (SEQ ID NO: 13579):RSVK (SEQ ID NO: 13569), YVPKPXX (SEQ ID NO: 13664):APTKL (SEQ ID NO: 13579):RSVK (SEQ ID NO: 13569), TVPKPXX (SEQ ID NO: 13663):APTQL (SEQ ID NO: 13582):RSVK (SEQ ID NO: 13569), AVPKAXX (SEQ ID NO: 13649):APTKL (SEQ ID NO: 13579):RSVK (SEQ ID NO: 13569), KVGKAXX (SEQ ID NO: 13656):VPTKL (SEQ ID NO: 13633):RSVK (SEQ ID NO: 13569), KASKAXX (SEQ ID NO: 13654):VPTKL (SEQ ID NO: 13633):RSVK (SEQ ID NO: 13569), GSAGPXX (SEQ ID NO: 13651):TPTKM (SEQ ID NO: 13598):RSVK (SEQ ID NO: 13569), AAPASXX (SEQ ID NO: 13646):VPARL (SEQ ID NO: 13611):RSVK (SEQ ID NO: 13569), STPPTXX (SEQ ID NO: 13662):VPTRL (SEQ ID NO: 13637):RSVK (SEQ ID NO: 13569), HVPKPXX (SEQ ID NO: 13652):APTKL (SEQ ID NO: 13579):RSVK (SEQ ID NO: 13569), RVPSTXX (SEQ ID NO: 13659):APVKT (SEQ ID NO: 13589):RSVK (SEQ ID NO: 13569), ASAAPXX (SEQ ID NO: 13647):VPQAL (SEQ ID NO: 13620):RSVK (SEQ ID NO: 13569), ASASPXX (SEQ ID NO: 13648):VSQDL (SEQ ID NO: 13639):RSVK (SEQ ID NO: 13569), ASASPXX (SEQ ID NO: 13648):VPQDL (SEQ ID NO: 13621):RSVK (SEQ ID NO: 13569), NDEGLEX (SEQ ID NO: 13657):VPTEE (SEQ ID NO: 13630):RSVK (SEQ ID NO: 13569), NDEGLEX (SEQ ID NO: 13657):VPTGQ (SEQ ID NO: 13632):RSVK (SEQ ID NO: 13569), RNVQXRP (SEQ ID NO: 13658):TQVQL (SEQ ID NO: 13603):RSVK (SEQ ID NO: 13569), SSVKXQP (SEQ ID NO: 13661):TQVHH (SEQ ID NO: 13602):RPVQ (SEQ ID NO: 13568), KIPKAXX (SEQ ID NO: 13655):VPTEL (SEQ ID NO: 13631):RPVQ (SEQ ID NO: 13568), GIPEPXX (SEQ ID NO: 13650):VPEKM (SEQ ID NO: 13616):RPVQ (SEQ ID NO: 13568), SIPKAXX (SEQ ID NO: 13660):VPTEL (SEQ ID NO: 13631):RPVQ (SEQ ID NO: 13568), HVTKPTX (SEQ ID NO: 13653):APTKL (SEQ ID NO: 13579):RPVQ (SEQ ID NO: 13568), YVPKPXX (SEQ ID NO: 13664):APTKL (SEQ ID NO: 13579):RPVQ (SEQ ID NO: 13568), TVPKPXX (SEQ ID NO: 13663):APTQL (SEQ ID NO: 13582):RPVQ (SEQ ID NO: 13568), AVPKAXX (SEQ ID NO: 13649):APTKL (SEQ ID NO: 13579):RPVQ (SEQ ID NO: 13568), KVGKAXX (SEQ ID NO: 13656):VPTKL (SEQ ID NO: 13633):RPVQ (SEQ ID NO: 13568), KASKAXX (SEQ ID NO: 13654):VPTKL (SEQ ID NO: 13633):RPVQ (SEQ ID NO: 13568), GSAGPXX (SEQ ID NO: 13651):TPTKM (SEQ ID NO: 13598):RPVQ (SEQ ID NO: 13568), AAPASXX (SEQ ID NO: 13646):VPARL (SEQ ID NO: 13611):RPVQ (SEQ ID NO: 13568), STPPTXX (SEQ ID NO: 13662):VPTRL (SEQ ID NO: 13637):RPVQ (SEQ ID NO: 13568), HVPKPXX (SEQ ID NO: 13652):APTKL (SEQ ID NO: 13579):RPVQ (SEQ ID NO: 13568), RVPSTXX (SEQ ID NO: 13659):APVKT (SEQ ID NO: 13589):RPVQ (SEQ ID NO: 13568), ASAAPXX (SEQ ID NO: 13647):VPQAL (SEQ ID NO: 13620):RPVQ (SEQ ID NO: 13568), ASASPXX (SEQ ID NO: 13648):VSQDL (SEQ ID NO: 13639):RPVQ (SEQ ID NO: 13568), ASASPXX (SEQ ID NO: 13648):VPQDL (SEQ ID NO: 13621):RPVQ (SEQ ID NO: 13568), NDEGLEX (SEQ ID NO: 13657):VPTEE (SEQ ID NO: 13630):RPVQ (SEQ ID NO: 13568), NDEGLEX (SEQ ID NO: 13657):VPTGQ (SEQ ID NO: 13632):RPVQ (SEQ ID NO: 13568) and SSVKXQP (SEQ ID NO: 13661):SRVHH (SEQ ID NO: 13592):RPVQ (SEQ ID NO: 13568).

[0312] In certain embodiments, the triplet PEP7:PEP5:PEP12 is selected from the group consisting of GIPEPXX (SEQ ID NO: 13650):VPTKM (SEQ ID NO: 13634):SAIS-AA¹⁷-LYL (SEQ ID NO: 13808), HVTKPTX (SEQ ID NO: 13653):VPTKL (SEQ ID NO: 13633):SAIS-AA¹⁷-LYL (SEQ ID NO: 13808), YVPKPXX (SEQ ID NO: 13664):VPTKL (SEQ ID NO: 13633):SAIS-AA¹⁷-LYL (SEQ ID NO: 13808), TVPKPXX (SEQ ID NO: 13663):VPTQL (SEQ ID NO: 13636):SAIS-AA¹⁷-LYL (SEQ ID NO: 13808), AVPKAXX (SEQ ID NO: 13649):VPTKL (SEQ ID NO: 13633):SAIS-AA¹⁷-LYL (SEQ ID NO: 13808), KVGKAXX (SEQ ID NO: 13656):VPTKL (SEQ ID NO: 13633):SAIS-AA¹⁷-LYL (SEQ ID NO: 13808), KASKAXX (SEQ ID NO: 13654):VPTKL (SEQ ID NO: 13633):SAIS-AA¹⁷-LYL (SEQ ID NO: 13808), GSAGPXX (SEQ ID NO: 13651):VPTKM (SEQ ID NO: 13634):SAIS-AA¹⁷-LYL (SEQ ID NO: 13808), AAPASXX (SEQ ID NO: 13646):VPTRL (SEQ ID NO: 13637):SAIS-AA¹⁷-LYL (SEQ ID NO: 13808), STPPTXX (SEQ ID NO: 13662):VPTRL (SEQ ID NO: 13637):SAIS-AA¹⁷-LYL (SEQ ID NO: 13808), HVPKPXX (SEQ ID NO: 13652):VPTKL (SEQ ID NO: 13633):SAIS-AA¹⁷-LYL (SEQ ID NO: 13808), RVPSTXX (SEQ ID NO: 13659):VPTKT (SEQ ID NO: 13635):SAIS-AA¹⁷-LYL (SEQ ID NO: 13808), ASAAPXX (SEQ ID NO: 13647):VPTAL (SEQ ID NO: 13628):SAIS-AA¹⁷-LYL (SEQ ID NO: 13808), ASASPXX (SEQ ID NO: 13648):VPTDL (SEQ ID NO: 13629):SAIS-AA¹⁷-LYL (SEQ ID NO: 13808), GIPEPXX (SEQ ID NO: 13650):VPEKM (SEQ ID NO: 13616):SAIS-AA¹⁷-LYL (SEQ ID NO: 13808), HVTKPTX (SEQ ID NO: 13653):APTKL (SEQ ID NO: 13579):SAIS-AA¹⁷-LYL (SEQ ID NO: 13808), YVPKPXX (SEQ ID NO: 13664):APTKL (SEQ ID NO: 13579):SAIS-AA¹⁷-LYL (SEQ ID NO: 13808), TVPKPXX (SEQ ID NO: 13663):APTQL (SEQ ID NO: 13582):SAIS-AA¹⁷-LYL (SEQ ID NO: 13808), AVPKAXX (SEQ ID NO: 13649):APTKL (SEQ ID NO: 13579):SAIS-AA¹⁷-LYL (SEQ ID NO: 13808), GSAGPXX (SEQ ID NO: 13651):TPTKM (SEQ ID NO: 13598):SAIS-AA¹⁷-LYL (SEQ ID NO: 13808), AAPASXX (SEQ ID NO: 13646):VPARL (SEQ ID NO: 13611):SAIS-AA¹⁷-LYL (SEQ ID NO: 13808), HVPKPXX (SEQ ID NO: 13652):APTKL (SEQ ID NO: 13579):SAIS-AA¹⁷-LYL (SEQ ID NO: 13808), RVPSTXX (SEQ ID NO: 13659):APVKT (SEQ ID NO: 13589):SAIS-AA¹⁷-LYL (SEQ ID NO: 13808), ASAAPXX (SEQ ID NO: 13647):VPQAL (SEQ ID NO: 13620):SAIS-AA¹⁷-LYL (SEQ ID NO: 13808), ASASPXX (SEQ ID NO: 13648):VSQDL (SEQ ID NO: 13639):SAIS-AA¹⁷-LYL (SEQ ID NO: 13808), ASASPXX (SEQ ID NO: 13648):VPQDL (SEQ ID NO: 13621):SAIS-AA¹⁷-LYL (SEQ ID NO: 13808), SSVKXQP (SEQ ID NO: 13661):SRVHH (SEQ ID NO: 13592):SAIS-AA¹⁷-LYL (SEQ ID NO: 13808), RNVQXRP (SEQ ID NO: 13658):TQVQL (SEQ ID NO: 13603):SAIS-AA¹⁷-LYL (SEQ ID NO: 13808), KIPKAXX (SEQ ID NO: 13655):VPEEL (SEQ ID NO: 13614):SSLS-AA¹⁷-LFF (SEQ ID NO: 13815), SIPKAXX (SEQ ID NO: 13660):VPEEL (SEQ ID NO: 13614):SSLS-AA¹⁷-LFF (SEQ ID NO: 13815), HVTKPTX (SEQ ID NO: 13653):VPEKL (SEQ ID NO: 13615):SSLS-AA¹⁷-LFF (SEQ ID NO: 13815), YVPKPXX (SEQ ID NO: 13664):VPEKL (SEQ ID NO: 13615):SSLS-AA¹⁷-LFF (SEQ ID NO: 13815), TVPKPXX (SEQ ID NO: 13663):VPEQL (SEQ ID NO: 13618):SSLS-AA¹⁷-LFF (SEQ ID NO: 13815), AVPKAXX (SEQ ID NO: 13649):VPEKL (SEQ ID NO: 13615):SSLS-AA¹⁷-LFF (SEQ ID NO: 13815), KVGKAXX (SEQ ID NO: 13656):VPEKL (SEQ ID NO: 13615):SSLS-AA¹⁷-LFF (SEQ ID NO: 13815), KASKAXX (SEQ ID NO: 13654):VPEKL (SEQ ID NO: 13615):SSLS-AA¹⁷-LFF (SEQ ID NO: 13815), GSAGPXX (SEQ ID NO: 13651):VPEKM (SEQ ID NO: 13616):SSLS-AA¹⁷-LFF (SEQ ID NO: 13815), AAPASXX (SEQ ID NO: 13646):VPERL (SEQ ID NO: 13619):SSLS-AA¹⁷-LFF (SEQ ID NO: 13815), STPPTXX (SEQ ID NO: 13662):VPERL (SEQ ID NO: 13619):SSLS-AA¹⁷-LFF (SEQ ID NO: 13815), HVPKPXX (SEQ ID NO: 13652):VPEKL (SEQ ID NO: 13615):SSLS-AA¹⁷-LFF (SEQ ID NO: 13815), RVPSTXX (SEQ ID NO: 13659):VPEKT (SEQ ID NO: 13617):SSLS-AA¹⁷-LFF (SEQ ID NO: 13815), ASAAPXX (SEQ ID NO: 13647):VPEAL (SEQ ID NO: 13612):SSLS-AA¹⁷-LFF (SEQ ID NO: 13815), ASASPXX (SEQ ID NO: 13648):VPEDL (SEQ ID NO: 13613):SSLS-AA¹⁷-LFF (SEQ ID NO: 13815), KIPKAXX (SEQ ID NO: 13655):VPTEL (SEQ ID NO: 13631):SSLS-AA¹⁷-LFF (SEQ ID NO: 13815), SIPKAXX (SEQ ID NO: 13660):VPTEL (SEQ ID NO: 13631):SSLS-AA¹⁷-LFF (SEQ ID NO: 13815), HVTKPTX (SEQ ID NO: 13653):APTKL (SEQ ID NO: 13579):SSLS-AA¹⁷-LFF (SEQ ID NO: 13815), YVPKPXX (SEQ ID NO: 13664):APTKL (SEQ ID NO: 13579):SSLS-AA¹⁷-LFF (SEQ ID NO: 13815), TVPKPXX (SEQ ID NO: 13663):APTQL (SEQ ID NO: 13582):SSLS-AA¹⁷-LFF (SEQ ID NO: 13815), AVPKAXX (SEQ ID NO: 13649):APTKL (SEQ ID NO: 13579):SSLS-AA¹⁷-LFF (SEQ ID NO: 13815), KVGKAXX (SEQ ID NO: 13656):VPTKL (SEQ ID NO: 13633):SSLS-AA¹⁷-LFF (SEQ ID NO: 13815), KASKAXX (SEQ ID NO: 13654):VPTKL (SEQ ID NO: 13633):SSLS-AA¹⁷-LFF (SEQ ID NO: 13815), GSAGPXX (SEQ ID NO: 13651):TPTKM (SEQ ID NO: 13598):SSLS-AA¹⁷-LFF (SEQ ID NO: 13815), AAPASXX (SEQ ID NO: 13646):VPARL (SEQ ID NO: 13611):SSLS-AA¹⁷-LFF (SEQ ID NO: 13815), STPPTXX (SEQ ID NO: 13662):VPTRL (SEQ ID NO: 13637):SSLS-AA¹⁷-LFF (SEQ ID NO: 13815), HVPKPXX (SEQ ID NO: 13652):APTKL (SEQ ID NO: 13579):SSLS-AA¹⁷-LFF (SEQ ID NO: 13815), RVPSTXX (SEQ ID NO: 13659):APVKT (SEQ ID NO: 13589):SSLS-AA¹⁷-LFF (SEQ ID NO: 13815), ASAAPXX (SEQ ID NO: 13647):VPQAL (SEQ ID NO: 13620):SSLS-AA¹⁷-LFF (SEQ ID NO: 13815), ASASPXX (SEQ ID NO: 13648):VSQDL (SEQ ID NO: 13639):SSLS-AA¹⁷-LFF (SEQ ID NO: 13815), ASASPXX (SEQ ID NO: 13648):VPQDL (SEQ ID NO: 13621):SSLS-AA¹⁷-LFF (SEQ ID NO: 13815), NDEGLEX (SEQ ID NO: 13657):VPTEE (SEQ ID NO: 13630):SSLS-AA¹⁷-LFF (SEQ ID NO: 13815), NDEGLEX (SEQ ID NO: 13657):VPTGQ (SEQ ID NO: 13632):SSLS-AA¹⁷-LFF (SEQ ID NO: 13815), SSVKXQP (SEQ ID NO: 13661):SRVHH (SEQ ID NO: 13592):SSLS-AA¹⁷-LFF (SEQ ID NO: 13815), RNVQXRP (SEQ ID NO: 13658):TQVQL (SEQ ID NO: 13603):SSLS-AA¹⁷-LFF (SEQ ID NO: 13815), KIPKAXX (SEQ ID NO: 13655):APTEL (SEQ ID NO: 13578):NAIS-AA¹⁷-LYF (SEQ ID NO: 13805), GIPEPXX (SEQ ID NO: 13650):APTKM (SEQ ID NO: 13580):NAIS-AA¹⁷-LYF (SEQ ID NO: 13805), SIPKAXX (SEQ ID NO: 13660):APTEL (SEQ ID NO: 13578):NAIS-AA¹⁷-LYF (SEQ ID NO: 13805), AVPKAXX (SEQ ID NO: 13649):APTKL (SEQ ID NO: 13579):NAIS-AA¹⁷-LYF (SEQ ID NO: 13805), KVGKAXX (SEQ ID NO: 13656):APTKL (SEQ ID NO: 13579):NAIS-AA¹⁷-LYF (SEQ ID NO: 13805), KASKAXX (SEQ ID NO: 13654):APTKL (SEQ ID NO: 13579):NAIS-AA¹⁷-LYF (SEQ ID NO: 13805), GSAGPXX (SEQ ID NO: 13651):APTKM (SEQ ID NO: 13580):NAIS-AA¹⁷-LYF (SEQ ID NO: 13805), AAPASXX (SEQ ID NO: 13646):APTRL (SEQ ID NO: 13583):NAIS-AA¹⁷-LYF (SEQ ID NO: 13805), STPPTXX (SEQ ID NO: 13662):APTRL (SEQ ID NO: 13583):NAIS-AA¹⁷-LYF (SEQ ID NO: 13805), RVPSTXX (SEQ ID NO: 13659):APTKT (SEQ ID NO: 13581):NAIS-AA¹⁷-LYF (SEQ ID NO: 13805), ASAAPXX (SEQ ID NO: 13647):APTAL (SEQ ID NO: 13576):NAIS-AA¹⁷-LYF (SEQ ID NO: 13805), ASASPXX (SEQ ID NO: 13648):APTDL (SEQ ID NO: 13577):NAIS-AA¹⁷-LYF (SEQ ID NO: 13805), KIPKAXX (SEQ ID NO: 13655):VPTEL (SEQ ID NO: 13631):NAIS-AA¹⁷-LYF (SEQ ID NO: 13805), GIPEPXX (SEQ ID NO: 13650):VPEKM (SEQ ID NO: 13616):NAIS-AA¹⁷-LYF (SEQ ID NO: 13805), SIPKAXX (SEQ ID NO: 13660):VPTEL (SEQ ID NO: 13631):NAIS-AA¹⁷-LYF (SEQ ID NO: 13805), KVGKAXX (SEQ ID NO: 13656):VPTKL (SEQ ID NO: 13633):NAIS-AA¹⁷-LYF (SEQ ID NO: 13805), KASKAXX (SEQ ID NO: 13654):VPTKL (SEQ ID NO: 13633):NAIS-AA¹⁷-LYF (SEQ ID NO: 13805), GSAGPXX (SEQ ID NO: 13651):TPTKM (SEQ ID NO: 13598):NAIS-AA¹⁷-LYF (SEQ ID NO: 13805), AAPASXX (SEQ ID NO: 13646):VPARL (SEQ ID NO: 13611):NAIS-AA¹⁷-LYF (SEQ ID NO: 13805), STPPTXX (SEQ ID NO: 13662):VPTRL (SEQ ID NO: 13637):NAIS-AA¹⁷-LYF (SEQ ID NO: 13805), RVPSTXX (SEQ ID NO: 13659):APVKT (SEQ ID NO: 13589):NAIS-AA¹⁷-LYF (SEQ ID NO: 13805), ASAAPXX (SEQ ID NO: 13647):VPQAL (SEQ ID NO: 13620):NAIS-AA¹⁷-LYF (SEQ ID NO: 13805), ASASPXX (SEQ ID NO: 13648):VSQDL (SEQ ID NO: 13639):NAIS-AA¹⁷-LYF (SEQ ID NO: 13805), ASASPXX (SEQ ID NO: 13648):VPQDL (SEQ ID NO: 13621):NAIS-AA¹⁷-LYF (SEQ ID NO: 13805), NDEGLEX (SEQ ID NO: 13657):VPTEE (SEQ ID NO: 13630):NAIS-AA¹⁷-LYF (SEQ ID NO: 13805), NDEGLEX (SEQ ID NO: 13657):VPTGQ (SEQ ID NO: 13632):NAIS-AA¹⁷-LYF (SEQ ID NO: 13805), SSVKXQP (SEQ ID NO: 13661):SRVHH (SEQ ID NO: 13592):NAIS-AA¹⁷-LYF (SEQ ID NO: 13805), RNVQXRP (SEQ ID NO: 13658):TQVQL (SEQ ID NO: 13603):NAIS-AA¹⁷-LYF (SEQ ID NO: 13805), KIPKAXX (SEQ ID NO: 13655):APTEL (SEQ ID NO: 13578):SATS-AA¹⁷-LYY (SEQ ID NO: 13809), GIPEPXX (SEQ ID NO: 13650):APTKM (SEQ ID NO: 13580):SATS-AA¹⁷-LYY (SEQ ID NO: 13809), SIPKAXX (SEQ ID NO: 13660):APTEL (SEQ ID NO: 13578):SATS-AA¹⁷-LYY (SEQ ID NO: 13809), HVTKPTX (SEQ ID NO: 13653):APTKL (SEQ ID NO: 13579):SATS-AA¹⁷-LYY (SEQ ID NO: 13809), YVPKPXX (SEQ ID NO: 13664):APTKL (SEQ ID NO: 13579):SATS-AA¹⁷-LYY (SEQ ID NO: 13809), TVPKPXX (SEQ ID NO: 13663):APTQL (SEQ ID NO: 13582):SATS-AA¹⁷-LYY (SEQ ID NO: 13809), KVGKAXX (SEQ ID NO: 13656):APTKL (SEQ ID NO: 13579):SATS-AA¹⁷-LYY (SEQ ID NO: 13809), KASKAXX (SEQ ID NO: 13654):APTKL (SEQ ID NO: 13579):SATS-AA¹⁷-LYY (SEQ ID NO: 13809), GSAGPXX (SEQ ID NO: 13651):APTKM (SEQ ID NO: 13580):SATS-AA¹⁷-LYY (SEQ ID NO: 13809), AAPASXX (SEQ ID NO: 13646):APTRL (SEQ ID NO: 13583):SATS-AA¹⁷-LYY (SEQ ID NO: 13809), STPPTXX (SEQ ID NO: 13662):APTRL (SEQ ID NO: 13583):SATS-AA¹⁷-LYY (SEQ ID NO: 13809), HVPKPXX (SEQ ID NO: 13652):APTKL (SEQ ID NO: 13579):SATS-AA¹⁷-LYY (SEQ ID NO: 13809), RVPSTXX (SEQ ID NO: 13659):APTKT (SEQ ID NO: 13581):SATS-AA¹⁷-LYY (SEQ ID NO: 13809), ASAAPXX (SEQ ID NO: 13647):APTAL (SEQ ID NO: 13576):SATS-AA¹⁷-LYY (SEQ ID NO: 13809), ASASPXX (SEQ ID NO: 13648):APTDL (SEQ ID NO: 13577):SATS-AA¹⁷-LYY (SEQ ID NO: 13809), KIPKAXX (SEQ ID NO: 13655):VPTEL (SEQ ID NO: 13631):SATS-AA¹⁷-LYY (SEQ ID NO: 13809), GIPEPXX (SEQ ID NO: 13650):VPEKM (SEQ ID NO: 13616):SATS-AA¹⁷-LYY (SEQ ID NO: 13809), SIPKAXX (SEQ ID NO: 13660):VPTEL (SEQ ID NO: 13631):SATS-AA¹⁷-LYY (SEQ ID NO: 13809), KVGKAXX (SEQ ID NO: 13656):VPTKL (SEQ ID NO: 13633):SATS-AA¹⁷-LYY (SEQ ID NO: 13809), KASKAXX (SEQ ID NO: 13654):VPTKL (SEQ ID NO: 13633):SATS-AA¹⁷-LYY (SEQ ID NO: 13809), GSAGPXX (SEQ ID NO: 13651):TPTKM (SEQ ID NO: 13598):SATS-AA¹⁷-LYY (SEQ ID NO: 13809), AAPASXX (SEQ ID NO: 13646):VPARL (SEQ ID NO: 13611):SATS-AA¹⁷-LYY (SEQ ID NO: 13809), STPPTXX (SEQ ID NO: 13662):VPTRL (SEQ ID NO: 13637):SATS-AA¹⁷-LYY (SEQ ID NO: 13809), RVPSTXX (SEQ ID NO: 13659):APVKT (SEQ ID NO: 13589):SATS-AA¹⁷-LYY (SEQ ID NO: 13809), ASAAPXX (SEQ ID NO: 13647):VPQAL (SEQ ID NO: 13620):SATS-AA¹⁷-LYY (SEQ ID NO: 13809), ASASPXX (SEQ ID NO: 13648):VSQDL (SEQ ID NO: 13639):SATS-AA¹⁷-LYY (SEQ ID NO: 13809), ASASPXX (SEQ ID NO: 13648):VPQDL (SEQ ID NO: 13621):SATS-AA¹⁷-LYY (SEQ ID NO: 13809), NDEGLEX (SEQ ID NO: 13657):VPTEE (SEQ ID NO: 13630):SATS-AA¹⁷-LYY (SEQ ID NO: 13809), NDEGLEX (SEQ ID NO: 13657):VPTGQ (SEQ ID NO: 13632):SATS-AA¹⁷-LYY (SEQ ID NO: 13809), SSVKXQP (SEQ ID NO: 13661):SRVHH (SEQ ID NO: 13592):SATS-AA¹⁷-LYY (SEQ ID NO: 13809), RNVQXRP (SEQ ID NO: 13658):TQVQL (SEQ ID NO: 13603):SATS-AA¹⁷-LYY (SEQ ID NO: 13809), KIPKAXX (SEQ ID NO: 13655):VPTEL (SEQ ID NO: 13631):SPIS-AA¹⁷-LYK (SEQ ID NO: 13814), GIPEPXX (SEQ ID NO: 13650):VPTKM (SEQ ID NO: 13634):SPIS-AA¹⁷-LYK (SEQ ID NO: 13814), SIPKAXX (SEQ ID NO: 13660):VPTEL (SEQ ID NO: 13631):SPIS-AA¹⁷-LYK (SEQ ID NO: 13814), HVTKPTX (SEQ ID NO: 13653):VPTKL (SEQ ID NO: 13633):SPIS-AA¹⁷-LYK (SEQ ID NO: 13814), YVPKPXX (SEQ ID NO: 13664):VPTKL (SEQ ID NO: 13633):SPIS-AA¹⁷-LYK (SEQ ID NO: 13814), TVPKPXX (SEQ ID NO: 13663):VPTQL (SEQ ID NO: 13636):SPIS-AA¹⁷-LYK (SEQ ID NO: 13814), AVPKAXX (SEQ ID NO: 13649):VPTKL (SEQ ID NO: 13633):SPIS-AA¹⁷-LYK (SEQ ID NO: 13814), KASKAXX (SEQ ID NO: 13654):VPTKL (SEQ ID NO: 13633):SPIS-AA¹⁷-LYK (SEQ ID NO: 13814), GSAGPXX (SEQ ID NO: 13651):VPTKM (SEQ ID NO: 13634):SPIS-AA¹⁷-LYK (SEQ ID NO: 13814), AAPASXX (SEQ ID NO: 13646):VPTRL (SEQ ID NO: 13637):SPIS-AA¹⁷-LYK (SEQ ID NO: 13814), STPPTXX (SEQ ID NO: 13662):VPTRL (SEQ ID NO: 13637):SPIS-AA¹⁷-LYK (SEQ ID NO: 13814), HVPKPXX (SEQ ID NO: 13652):VPTKL (SEQ ID NO: 13633):SPIS-AA¹⁷-LYK (SEQ ID NO: 13814), RVPSTXX (SEQ ID NO: 13659):VPTKT (SEQ ID NO: 13635):SPIS-AA¹⁷-LYK (SEQ ID NO: 13814), ASAAPXX (SEQ ID NO: 13647):VPTAL (SEQ ID NO: 13628):SPIS-AA¹⁷-LYK (SEQ ID NO: 13814), ASASPXX (SEQ ID NO: 13648):VPTDL (SEQ ID NO: 13629):SPIS-AA¹⁷-LYK (SEQ ID NO: 13814), GIPEPXX (SEQ ID NO: 13650):VPEKM (SEQ ID NO: 13616):SPIS-AA¹⁷-LYK (SEQ ID NO: 13814), HVTKPTX (SEQ ID NO: 13653):APTKL (SEQ ID NO: 13579):SPIS-AA¹⁷-LYK (SEQ ID NO: 13814), YVPKPXX (SEQ ID NO: 13664):APTKL (SEQ ID NO: 13579):SPIS-AA¹⁷-LYK (SEQ ID NO: 13814), TVPKPXX (SEQ ID NO: 13663):APTQL (SEQ ID NO: 13582):SPIS-AA¹⁷-LYK (SEQ ID NO: 13814), AVPKAXX (SEQ ID NO: 13649):APTKL (SEQ ID NO: 13579):SPIS-AA¹⁷-LYK (SEQ ID NO: 13814), GSAGPXX (SEQ ID NO: 13651):TPTKM (SEQ ID NO: 13598):SPIS-AA¹⁷-LYK (SEQ ID NO: 13814), AAPASXX (SEQ ID NO: 13646):VPARL (SEQ ID NO: 13611):SPIS-AA¹⁷-LYK (SEQ ID NO: 13814), HVPKPXX (SEQ ID NO: 13652):APTKL (SEQ ID NO: 13579):SPIS-AA¹⁷-LYK (SEQ ID NO: 13814), RVPSTXX (SEQ ID NO: 13659):APVKT (SEQ ID NO: 13589):SPIS-AA¹⁷-LYK (SEQ ID NO: 13814), ASAAPXX (SEQ ID NO: 13647):VPQAL (SEQ ID NO: 13620):SPIS-AA¹⁷-LYK (SEQ ID NO: 13814), ASASPXX (SEQ ID NO: 13648):VSQDL (SEQ ID NO: 13639):SPIS-AA¹⁷-LYK (SEQ ID NO: 13814), ASASPXX (SEQ ID NO: 13648):VPQDL (SEQ ID NO: 13621):SPIS-AA¹⁷-LYK (SEQ ID NO: 13814), SSVKXQP (SEQ ID NO: 13661):SRVHH (SEQ ID NO: 13592):SPIS-AA¹⁷-LYK (SEQ ID NO: 13814), RNVQXRP (SEQ ID NO: 13658):TQVQL (SEQ ID NO: 13603):SPIS-AA¹⁷-LYK (SEQ ID NO: 13814), KIPKAXX (SEQ ID NO: 13655):VPTEL (SEQ ID NO: 13631):EPIS-AA¹⁷-LYL (SEQ ID NO: 13801), GIPEPXX (SEQ ID NO: 13650):VPTKM (SEQ ID NO: 13634):EPIS-AA¹⁷-LYL (SEQ ID NO: 13801), SIPKAXX (SEQ ID NO: 13660):VPTEL (SEQ ID NO: 13631):EPIS-AA¹⁷-LYL (SEQ ID NO: 13801), HVTKPTX (SEQ ID NO: 13653):VPTKL (SEQ ID NO: 13633):EPIS-AA¹⁷-LYL (SEQ ID NO: 13801), YVPKPXX (SEQ ID NO: 13664):VPTKL (SEQ ID NO: 13633):EPIS-AA¹⁷-LYL (SEQ ID NO: 13801), TVPKPXX (SEQ ID NO: 13663):VPTQL (SEQ ID NO: 13636):EPIS-AA¹⁷-LYL (SEQ ID NO: 13801), AVPKAXX (SEQ ID NO: 13649):VPTKL (SEQ ID NO: 13633):EPIS-AA¹⁷-LYL (SEQ ID NO: 13801), KVGKAXX (SEQ ID NO: 13656):VPTKL (SEQ ID NO: 13633):EPIS-AA¹⁷-LYL (SEQ ID NO: 13801), GSAGPXX (SEQ ID NO: 13651):VPTKM (SEQ ID NO: 13634):EPIS-AA¹⁷-LYL (SEQ ID NO: 13801), AAPASXX (SEQ ID NO: 13646):VPTRL (SEQ ID NO: 13637):EPIS-AA¹⁷-LYL (SEQ ID NO: 13801), STPPTXX (SEQ ID NO: 13662):VPTRL (SEQ ID NO: 13637):EPIS-AA¹⁷-LYL (SEQ ID NO: 13801), HVPKPXX (SEQ ID NO: 13652):VPTKL (SEQ ID NO: 13633):EPIS-AA¹⁷-LYL (SEQ ID NO: 13801), RVPSTXX (SEQ ID NO: 13659):VPTKT (SEQ ID NO: 13635):EPIS-AA¹⁷-LYL (SEQ ID NO: 13801), ASAAPXX (SEQ ID NO: 13647):VPTAL (SEQ ID NO: 13628):EPIS-AA¹⁷-LYL (SEQ ID NO: 13801), ASASPXX (SEQ ID NO: 13648):VPTDL (SEQ ID NO: 13629):EPIS-AA¹⁷-LYL (SEQ ID NO: 13801), GIPEPXX (SEQ ID NO: 13650):VPEKM (SEQ ID NO: 13616):EPIS-AA¹⁷-LYL (SEQ ID NO: 13801), HVTKPTX (SEQ ID NO: 13653):APTKL (SEQ ID NO: 13579):EPIS-AA¹⁷-LYL (SEQ ID NO: 13801), YVPKPXX (SEQ ID NO: 13664):APTKL (SEQ ID NO: 13579):EPIS-AA¹⁷-LYL (SEQ ID NO: 13801), TVPKPXX (SEQ ID NO: 13663):APTQL (SEQ ID NO: 13582):EPIS-AA¹⁷-LYL (SEQ ID NO: 13801), AVPKAXX (SEQ ID NO: 13649):APTKL (SEQ ID NO: 13579):EPIS-AA¹⁷-LYL (SEQ ID NO: 13801), GSAGPXX (SEQ ID NO: 13651):TPTKM (SEQ ID NO: 13598):EPIS-AA¹⁷-LYL (SEQ ID NO: 13801), AAPASXX (SEQ ID NO: 13646):VPARL (SEQ ID NO: 13611):EPIS-AA¹⁷-LYL (SEQ ID NO: 13801), HVPKPXX (SEQ ID NO: 13652):APTKL (SEQ ID NO: 13579):EPIS-AA¹⁷-LYL (SEQ ID NO: 13801), RVPSTXX (SEQ ID NO: 13659):APVKT (SEQ ID NO: 13589):EPIS-AA¹⁷-LYL (SEQ ID NO: 13801), ASAAPXX (SEQ ID NO: 13647):VPQAL (SEQ ID NO: 13620):EPIS-AA¹⁷-LYL (SEQ ID NO: 13801), ASASPXX (SEQ ID NO: 13648):VSQDL (SEQ ID NO: 13639):EPIS-AA¹⁷-LYL (SEQ ID NO: 13801), ASASPXX (SEQ ID NO: 13648):VPQDL (SEQ ID NO: 13621):EPIS-AA¹⁷-LYL (SEQ ID NO: 13801), SSVKXQP (SEQ ID NO: 13661):SRVHH (SEQ ID NO: 13592):EPIS-AA¹⁷-LYL (SEQ ID NO: 13801), RNVQXRP (SEQ ID NO: 13658):TQVQL (SEQ ID NO: 13603):EPIS-AA¹⁷-LYL (SEQ ID NO: 13801), KIPKAXX (SEQ ID NO: 13655):TPTEL (SEQ ID NO: 13596):SPIN-AA¹⁷-LYF (SEQ ID NO: 13811), GIPEPXX (SEQ ID NO: 13650):TPTKM (SEQ ID NO: 13598):SPIN-AA¹⁷-LYF (SEQ ID NO: 13811), SIPKAXX (SEQ ID NO: 13660):TPTEL (SEQ ID NO: 13596):SPIN-AA¹⁷-LYF (SEQ ID NO: 13811), HVTKPTX (SEQ ID NO: 13653):TPTKL (SEQ ID NO: 13597):SPIN-AA¹⁷-LYF (SEQ ID NO: 13811), YVPKPXX (SEQ ID NO: 13664):TPTKL (SEQ ID NO: 13597):SPIN-AA¹⁷-LYF (SEQ ID NO: 13811), TVPKPXX (SEQ ID NO: 13663):TPTQL (SEQ ID NO: 13600):SPIN-AA¹⁷-LYF (SEQ ID NO: 13811), AVPKAXX (SEQ ID NO: 13649):TPTKL (SEQ ID NO: 13597):SPIN-AA¹⁷-LYF (SEQ ID NO: 13811), KVGKAXX (SEQ ID NO: 13656):TPTKL (SEQ ID NO: 13597):SPIN-AA¹⁷-LYF (SEQ ID NO: 13811), KASKAXX (SEQ ID NO: 13654):TPTKL (SEQ ID NO: 13597):SPIN-AA¹⁷-LYF (SEQ ID NO: 13811), AAPASXX (SEQ ID NO: 13646):TPTRL (SEQ ID NO: 13601):SPIN-AA¹⁷-LYF (SEQ ID NO: 13811), STPPTXX (SEQ ID NO: 13662):TPTRL (SEQ ID NO: 13601):SPIN-AA¹⁷-LYF (SEQ ID NO: 13811), HVPKPXX (SEQ ID NO: 13652):TPTKL (SEQ ID NO: 13597):SPIN-AA¹⁷-LYF (SEQ ID NO: 13811), RVPSTXX (SEQ ID NO: 13659):TPTKT (SEQ ID NO: 13599):SPIN-AA¹⁷-LYF (SEQ ID NO: 13811), ASAAPXX (SEQ ID NO: 13647):TPTAL (SEQ ID NO: 13594):SPIN-AA¹⁷-LYF (SEQ ID NO: 13811), ASASPXX (SEQ ID NO: 13648):TPTDL (SEQ ID NO: 13595):SPIN-AA¹⁷-LYF (SEQ ID NO: 13811), KIPKAXX (SEQ ID NO: 13655):VPTEL (SEQ ID NO: 13631):SPIN-AA¹⁷-LYF (SEQ ID NO: 13811), GIPEPXX (SEQ ID NO: 13650):VPEKM (SEQ ID NO: 13616):SPIN-AA¹⁷-LYF (SEQ ID NO: 13811), SIPKAXX (SEQ ID NO: 13660):VPTEL (SEQ ID NO: 13631):SPIN-AA¹⁷-LYF (SEQ ID NO: 13811), HVTKPTX (SEQ ID NO: 13653):APTKL (SEQ ID NO: 13579):SPIN-AA¹⁷-LYF (SEQ ID NO: 13811), YVPKPXX (SEQ ID NO: 13664):APTKL (SEQ ID NO: 13579):SPIN-AA¹⁷-LYF (SEQ ID NO: 13811), TVPKPXX (SEQ ID NO: 13663):APTQL (SEQ ID NO: 13582):SPIN-AA¹⁷-LYF (SEQ ID NO: 13811), AVPKAXX (SEQ ID NO: 13649):APTKL (SEQ ID NO: 13579):SPIN-AA¹⁷-LYF (SEQ ID NO: 13811), KVGKAXX (SEQ ID NO: 13656):VPTKL (SEQ ID NO: 13633):SPIN-AA¹⁷-LYF (SEQ ID NO: 13811), KASKAXX (SEQ ID NO: 13654):VPTKL (SEQ ID NO: 13633):SPIN-AA¹⁷-LYF (SEQ ID NO: 13811), AAPASXX (SEQ ID NO: 13646):VPARL (SEQ ID NO: 13611):SPIN-AA¹⁷-LYF (SEQ ID NO: 13811), STPPTXX (SEQ ID NO: 13662):VPTRL (SEQ ID NO: 13637):SPIN-AA¹⁷-LYF (SEQ ID NO: 13811), HVPKPXX (SEQ ID NO: 13652):APTKL (SEQ ID NO: 13579):SPIN-AA¹⁷-LYF (SEQ ID NO: 13811), RVPSTXX (SEQ ID NO: 13659):APVKT (SEQ ID NO: 13589):SPIN-AA¹⁷-LYF (SEQ ID NO: 13811), ASAAPXX (SEQ ID NO: 13647):VPQAL (SEQ ID NO: 13620):SPIN-AA¹⁷-LYF (SEQ ID NO: 13811), ASASPXX (SEQ ID NO: 13648):VSQDL (SEQ ID NO: 13639):SPIN-AA¹⁷-LYF (SEQ ID NO: 13811), ASASPXX (SEQ ID NO: 13648):VPQDL (SEQ ID NO: 13621):SPIN-AA¹⁷-LYF (SEQ ID NO: 13811), NDEGLEX (SEQ ID NO: 13657):VPTEE (SEQ ID NO: 13630):SPIN-AA¹⁷-LYF (SEQ ID NO: 13811), NDEGLEX (SEQ ID NO: 13657):VPTGQ (SEQ ID NO: 13632):SPIN-AA¹⁷-LYF (SEQ ID NO: 13811), SSVKXQP (SEQ ID NO: 13661):SRVHH (SEQ ID NO: 13592):SPIN-AA¹⁷-LYF (SEQ ID NO: 13811), RNVQXRP (SEQ ID NO: 13658):TQVQL (SEQ ID NO: 13603):SPIN-AA¹⁷-LYF (SEQ ID NO: 13811), KIPKAXX (SEQ ID NO: 13655):VPAEL (SEQ ID NO: 13606):SPIS-AA¹⁷-LYI (SEQ ID NO: 13813), GIPEPXX (SEQ ID NO: 13650):VPAKM (SEQ ID NO: 13608):SPIS-AA¹⁷-LYI (SEQ ID NO: 13813), SIPKAXX (SEQ ID NO: 13660):VPAEL (SEQ ID NO: 13606):SPIS-AA¹⁷-LYI (SEQ ID NO: 13813), HVTKPTX (SEQ ID NO: 13653):VPAKL (SEQ ID NO: 13607):SPIS-AA¹⁷-LYI (SEQ ID NO: 13813), YVPKPXX (SEQ ID NO: 13664):VPAKL (SEQ ID NO: 13607):SPIS-AA¹⁷-LYI (SEQ ID NO: 13813), TVPKPXX (SEQ ID NO: 13663):VPAQL (SEQ ID NO: 13610):SPIS-AA¹⁷-LYI (SEQ ID NO: 13813), AVPKAXX (SEQ ID NO: 13649):VPAKL (SEQ ID NO: 13607):SPIS-AA¹⁷-LYI (SEQ ID NO: 13813), KVGKAXX (SEQ ID NO: 13656):VPAKL (SEQ ID NO: 13607):SPIS-AA¹⁷-LYI (SEQ ID NO: 13813), KASKAXX (SEQ ID NO: 13654):VPAKL (SEQ ID NO: 13607):SPIS-AA¹⁷-LYI (SEQ ID NO: 13813), GSAGPXX (SEQ ID NO: 13651):VPAKM (SEQ ID NO: 13608):SPIS-AA¹⁷-LYI (SEQ ID NO: 13813), STPPTXX (SEQ ID NO: 13662):VPARL (SEQ ID NO: 13611):SPIS-AA¹⁷-LYI (SEQ ID NO: 13813), HVPKPXX (SEQ ID NO: 13652):VPAKL (SEQ ID NO: 13607):SPIS-AA¹⁷-LYI (SEQ ID NO: 13813), RVPSTXX (SEQ ID NO: 13659):VPAKT (SEQ ID NO: 13609):SPIS-AA¹⁷-LYI (SEQ ID NO: 13813), ASAAPXX (SEQ ID NO: 13647):VPAAL (SEQ ID NO: 13604):SPIS-AA¹⁷-LYI (SEQ ID NO: 13813), ASASPXX (SEQ ID NO: 13648):VPADL (SEQ ID NO: 13605):SPIS-AA¹⁷-LYI (SEQ ID NO: 13813), KIPKAXX (SEQ ID NO: 13655):VPTEL (SEQ ID NO: 13631):SPIS-AA¹⁷-LYI (SEQ ID NO: 13813), GIPEPXX (SEQ ID NO: 13650):VPEKM (SEQ ID NO: 13616):SPIS-AA¹⁷-LYI (SEQ ID NO: 13813), SIPKAXX (SEQ ID NO: 13660):VPTEL (SEQ ID NO: 13631):SPIS-AA¹⁷-LYI (SEQ ID NO: 13813), HVTKPTX (SEQ ID NO: 13653):APTKL (SEQ ID NO: 13579):SPIS-AA¹⁷-LYI (SEQ ID NO: 13813), YVPKPXX (SEQ ID NO: 13664):APTKL (SEQ ID NO: 13579):SPIS-AA¹⁷-LYI (SEQ ID NO: 13813), TVPKPXX (SEQ ID NO: 13663):APTQL (SEQ ID NO: 13582):SPIS-AA¹⁷-LYI (SEQ ID NO: 13813), AVPKAXX (SEQ ID NO: 13649):APTKL (SEQ ID NO: 13579):SPIS-AA¹⁷-LYI (SEQ ID NO: 13813), KVGKAXX (SEQ ID NO: 13656):VPTKL (SEQ ID NO: 13633):SPIS-AA¹⁷-LYI (SEQ ID NO: 13813), KASKAXX (SEQ ID NO: 13654):VPTKL (SEQ ID NO: 13633):SPIS-AA¹⁷-LYI (SEQ ID NO: 13813), GSAGPXX (SEQ ID NO: 13651):TPTKM (SEQ ID NO: 13598):SPIS-AA¹⁷-LYI (SEQ ID NO: 13813), STPPTXX (SEQ ID NO: 13662):VPTRL (SEQ ID NO: 13637):SPIS-AA¹⁷-LYI (SEQ ID NO: 13813), HVPKPXX (SEQ ID NO: 13652):APTKL (SEQ ID NO: 13579):SPIS-AA¹⁷-LYI (SEQ ID NO: 13813), RVPSTXX (SEQ ID NO: 13659):APVKT (SEQ ID NO: 13589):SPIS-AA¹⁷-LYI (SEQ ID NO: 13813), ASAAPXX (SEQ ID NO: 13647):VPQAL (SEQ ID NO: 13620):SPIS-AA¹⁷-LYI (SEQ ID NO: 13813), ASASPXX (SEQ ID NO: 13648):VSQDL (SEQ ID NO: 13639):SPIS-AA¹⁷-LYI (SEQ ID NO: 13813), ASASPXX (SEQ ID NO: 13648):VPQDL (SEQ ID NO: 13621):SPIS-AA¹⁷-LYI (SEQ ID NO: 13813), NDEGLEX (SEQ ID NO: 13657):VPTEE (SEQ ID NO: 13630):SPIS-AA¹⁷-LYI (SEQ ID NO: 13813), NDEGLEX (SEQ ID NO: 13657):VPTGQ (SEQ ID NO: 13632):SPIS-AA¹⁷-LYI (SEQ ID NO: 13813), SSVKXQP (SEQ ID NO: 13661):SRVHH (SEQ ID NO: 13592):SPIS-AA¹⁷-LYI (SEQ ID NO: 13813), RNVQXRP (SEQ ID NO: 13658):TQVQL (SEQ ID NO: 13603):SPIS-AA¹⁷-LYI (SEQ ID NO: 13813), KIPKAXX (SEQ ID NO: 13655):VPTEL (SEQ ID NO: 13631):SPIS-AA¹⁷-LFI (SEQ ID NO: 13812), GIPEPXX (SEQ ID NO: 13650):VPTKM (SEQ ID NO: 13634):SPIS-AA¹⁷-LFI (SEQ ID NO: 13812), SIPKAXX (SEQ ID NO: 13660):VPTEL (SEQ ID NO: 13631):SPIS-AA¹⁷-LFI (SEQ ID NO: 13812), HVTKPTX (SEQ ID NO: 13653):VPTKL (SEQ ID NO: 13633):SPIS-AA¹⁷-LFI (SEQ ID NO: 13812), YVPKPXX (SEQ ID NO: 13664):VPTKL (SEQ ID NO: 13633):SPIS-AA¹⁷-LFI (SEQ ID NO: 13812), TVPKPXX (SEQ ID NO: 13663):VPTQL (SEQ ID NO: 13636):SPIS-AA¹⁷-LFI (SEQ ID NO: 13812), AVPKAXX (SEQ ID NO: 13649):VPTKL (SEQ ID NO: 13633):SPIS-AA¹⁷-LFI (SEQ ID NO: 13812), KVGKAXX (SEQ ID NO: 13656):VPTKL (SEQ ID NO: 13633):SPIS-AA¹⁷-LFI (SEQ ID NO: 13812), KASKAXX (SEQ ID NO: 13654):VPTKL (SEQ ID NO: 13633):SPIS-AA¹⁷-LFI (SEQ ID NO: 13812), GSAGPXX (SEQ ID NO: 13651):VPTKM (SEQ ID NO: 13634):SPIS-AA¹⁷-LFI (SEQ ID NO: 13812), AAPASXX (SEQ ID NO: 13646):VPTRL (SEQ ID NO: 13637):SPIS-AA¹⁷-LFI (SEQ ID NO: 13812), HVPKPXX (SEQ ID NO: 13652):VPTKL (SEQ ID NO: 13633):SPIS-AA¹⁷-LFI (SEQ ID NO: 13812), RVPSTXX (SEQ ID NO: 13659):VPTKT (SEQ ID NO: 13635):SPIS-AA¹⁷-LFI (SEQ ID NO: 13812), ASAAPXX (SEQ ID NO: 13647):VPTAL (SEQ ID NO: 13628):SPIS-AA¹⁷-LFI (SEQ ID NO: 13812), ASASPXX (SEQ ID NO: 13648):VPTDL (SEQ ID NO: 13629):SPIS-AA¹⁷-LFI (SEQ ID NO: 13812), GIPEPXX (SEQ ID NO: 13650):VPEKM (SEQ ID NO: 13616):SPIS-AA¹⁷-LFI (SEQ ID NO: 13812), HVTKPTX (SEQ ID NO: 13653):APTKL (SEQ ID NO: 13579):SPIS-AA¹⁷-LFI (SEQ ID NO: 13812), YVPKPXX (SEQ ID NO: 13664):APTKL (SEQ ID NO: 13579):SPIS-AA¹⁷-LFI (SEQ ID NO: 13812), TVPKPXX (SEQ ID NO: 13663):APTQL (SEQ ID NO: 13582):SPIS-AA¹⁷-LFI (SEQ ID NO: 13812), AVPKAXX (SEQ ID NO: 13649):APTKL (SEQ ID NO: 13579):SPIS-AA¹⁷-LFI (SEQ ID NO: 13812), GSAGPXX (SEQ ID NO: 13651):TPTKM (SEQ ID NO: 13598):SPIS-AA¹⁷-LFI (SEQ ID NO: 13812), AAPASXX (SEQ ID NO: 13646):VPARL (SEQ ID NO: 13611):SPIS-AA¹⁷-LFI (SEQ ID NO: 13812), HVPKPXX (SEQ ID NO: 13652):APTKL (SEQ ID NO: 13579):SPIS-AA¹⁷-LFI (SEQ ID NO: 13812), RVPSTXX (SEQ ID NO: 13659):APVKT (SEQ ID NO: 13589):SPIS-AA¹⁷-LFI (SEQ ID NO: 13812), ASAAPXX (SEQ ID NO: 13647):VPQAL (SEQ ID NO: 13620):SPIS-AA¹⁷-LFI (SEQ ID NO: 13812), ASASPXX (SEQ ID NO: 13648):VSQDL (SEQ ID NO: 13639):SPIS-AA¹⁷-LFI (SEQ ID NO: 13812), ASASPXX (SEQ ID NO: 13648):VPQDL (SEQ ID NO: 13621):SPIS-AA¹⁷-LFI (SEQ ID NO: 13812), SSVKXQP (SEQ ID NO: 13661):SRVHH (SEQ ID NO: 13592):SPIS-AA¹⁷-LFI (SEQ ID NO: 13812), RNVQXRP (SEQ ID NO: 13658):TQVQL (SEQ ID NO: 13603):SPIS-AA¹⁷-LFI (SEQ ID NO: 13812), KIPKAXX (SEQ ID NO: 13655):APVEL (SEQ ID NO: 13586):KPLS-AA¹⁷-LYV (SEQ ID NO: 13804), GIPEPXX (SEQ ID NO: 13650):APVKM (SEQ ID NO: 13588):KPLS-AA¹⁷-LYV (SEQ ID NO: 13804), SIPKAXX (SEQ ID NO: 13660):APVEL (SEQ ID NO: 13586):KPLS-AA¹⁷-LYV (SEQ ID NO: 13804), HVTKPTX (SEQ ID NO: 13653):APVKL (SEQ ID NO: 13587):KPLS-AA¹⁷-LYV (SEQ ID NO: 13804), YVPKPXX (SEQ ID NO: 13664):APVKL (SEQ ID NO: 13587):KPLS-AA¹⁷-LYV (SEQ ID NO: 13804), TVPKPXX (SEQ ID NO: 13663):APVQL (SEQ ID NO: 13590):KPLS-AA¹⁷-LYV (SEQ ID NO: 13804), AVPKAXX (SEQ ID NO: 13649):APVKL (SEQ ID NO: 13587):KPLS-AA¹⁷-LYV (SEQ ID NO: 13804), KVGKAXX (SEQ ID NO: 13656):APVKL (SEQ ID NO: 13587):KPLS-AA¹⁷-LYV (SEQ ID NO: 13804), KASKAXX (SEQ ID NO: 13654):APVKL (SEQ ID NO: 13587):KPLS-AA¹⁷-LYV (SEQ ID NO: 13804), GSAGPXX (SEQ ID NO: 13651):APVKM (SEQ ID NO: 13588):KPLS-AA¹⁷-LYV (SEQ ID NO: 13804), AAPASXX (SEQ ID NO: 13646):APVRL (SEQ ID NO: 13591):KPLS-AA¹⁷-LYV (SEQ ID NO: 13804), STPPTXX (SEQ ID NO: 13662):APVRL (SEQ ID NO: 13591):KPLS-AA¹⁷-LYV (SEQ ID NO: 13804), HVPKPXX (SEQ ID NO: 13652):APVKL (SEQ ID NO: 13587):KPLS-AA¹⁷-LYV (SEQ ID NO: 13804), ASAAPXX (SEQ ID NO: 13647):APVAL (SEQ ID NO: 13584):KPLS-AA¹⁷-LYV (SEQ ID NO: 13804), ASASPXX (SEQ ID NO: 13648):APVDL (SEQ ID NO: 13585):KPLS-AA¹⁷-LYV (SEQ ID NO: 13804), KIPKAXX (SEQ ID NO: 13655):VPTEL (SEQ ID NO: 13631):KPLS-AA¹⁷-LYV (SEQ ID NO: 13804), GIPEPXX (SEQ ID NO: 13650):VPEKM (SEQ ID NO: 13616):KPLS-AA¹⁷-LYV (SEQ ID NO: 13804), SIPKAXX (SEQ ID NO: 13660):VPTEL (SEQ ID NO: 13631):KPLS-AA¹⁷-LYV (SEQ ID NO: 13804), HVTKPTX (SEQ ID NO: 13653):APTKL (SEQ ID NO: 13579):KPLS-AA¹⁷-LYV (SEQ ID NO: 13804), YVPKPXX (SEQ ID NO: 13664):APTKL (SEQ ID NO: 13579):KPLS-AA¹⁷-LYV (SEQ ID NO: 13804), TVPKPXX (SEQ ID NO: 13663):APTQL (SEQ ID NO: 13582):KPLS-AA¹⁷-LYV (SEQ ID NO: 13804), AVPKAXX (SEQ ID NO: 13649):APTKL (SEQ ID NO: 13579):KPLS-AA¹⁷-LYV (SEQ ID NO: 13804), KVGKAXX (SEQ ID NO: 13656):VPTKL (SEQ ID NO: 13633):KPLS-AA¹⁷-LYV (SEQ ID NO: 13804), KASKAXX (SEQ ID NO: 13654):VPTKL (SEQ ID NO: 13633):KPLS-AA¹⁷-LYV (SEQ ID NO: 13804), GSAGPXX (SEQ ID NO: 13651):TPTKM (SEQ ID NO: 13598):KPLS-AA¹⁷-LYV (SEQ ID NO: 13804), AAPASXX (SEQ ID NO: 13646):VPARL (SEQ ID NO: 13611):KPLS-AA¹⁷-LYV (SEQ ID NO: 13804), STPPTXX (SEQ ID NO: 13662):VPTRL (SEQ ID NO: 13637):KPLS-AA¹⁷-LYV (SEQ ID NO: 13804), HVPKPXX (SEQ ID NO: 13652):APTKL (SEQ ID NO: 13579):KPLS-AA¹⁷-LYV (SEQ ID NO: 13804), ASAAPXX (SEQ ID NO: 13647):VPQAL (SEQ ID NO: 13620):KPLS-AA¹⁷-LYV (SEQ ID NO: 13804), ASASPXX (SEQ ID NO: 13648):VSQDL (SEQ ID NO: 13639):KPLS-AA¹⁷-LYV (SEQ ID NO: 13804), ASASPXX (SEQ ID NO: 13648):VPQDL (SEQ ID NO: 13621):KPLS-AA¹⁷-LYV (SEQ ID NO: 13804), NDEGLEX (SEQ ID NO: 13657):VPTEE (SEQ ID NO: 13630):KPLS-AA¹⁷-LYV (SEQ ID NO: 13804), NDEGLEX (SEQ ID NO: 13657):VPTGQ (SEQ ID NO: 13632):KPLS-AA¹⁷-LYV (SEQ ID NO: 13804), SSVKXQP (SEQ ID NO: 13661):SRVHH (SEQ ID NO: 13592):KPLS-AA¹⁷-LYV (SEQ ID NO: 13804), RNVQXRP (SEQ ID NO: 13658):TQVQL (SEQ ID NO: 13603):KPLS-AA¹⁷-LYV (SEQ ID NO: 13804), KIPKAXX (SEQ ID NO: 13655):VPQEL (SEQ ID NO: 13622):EPLP-AA¹⁷-VYY (SEQ ID NO: 13802), GIPEPXX (SEQ ID NO: 13650):VPQKM (SEQ ID NO: 13624):EPLP-AA¹⁷-VYY (SEQ ID NO: 13802), SIPKAXX (SEQ ID NO: 13660):VPQEL (SEQ ID NO: 13622):EPLP-AA¹⁷-VYY (SEQ ID NO: 13802), HVTKPTX (SEQ ID NO: 13653):VPQKL (SEQ ID NO: 13623):EPLP-AA¹⁷-VYY (SEQ ID NO: 13802), YVPKPXX (SEQ ID NO: 13664):VPQKL (SEQ ID NO: 13623):EPLP-AA¹⁷-VYY (SEQ ID NO: 13802), TVPKPXX (SEQ ID NO: 13663):VPQQL (SEQ ID NO: 13626):EPLP-AA¹⁷-VYY (SEQ ID NO: 13802), AVPKAXX (SEQ ID NO: 13649):VPQKL (SEQ ID NO: 13623):EPLP-AA¹⁷-VYY (SEQ ID NO: 13802), KVGKAXX (SEQ ID NO: 13656):VPQKL (SEQ ID NO: 13623):EPLP-AA¹⁷-VYY (SEQ ID NO: 13802), KASKAXX (SEQ ID NO: 13654):VPQKL (SEQ ID NO: 13623):EPLP-AA¹⁷-VYY (SEQ ID NO: 13802), GSAGPXX (SEQ ID NO: 13651):VPQKM (SEQ ID NO: 13624):EPLP-AA¹⁷-VYY (SEQ ID NO: 13802), AAPASXX (SEQ ID NO: 13646):VPQRL (SEQ ID NO: 13627):EPLP-AA¹⁷-VYY (SEQ ID NO: 13802), STPPTXX (SEQ ID NO: 13662):VPQRL (SEQ ID NO: 13627):EPLP-AA¹⁷-VYY (SEQ ID NO: 13802), HVPKPXX (SEQ ID NO: 13652):VPQKL (SEQ ID NO: 13623):EPLP-AA¹⁷-VYY (SEQ ID NO: 13802), RVPSTXX (SEQ ID NO: 13659):VPQKT (SEQ ID NO: 13625):EPLP-AA¹⁷-VYY (SEQ ID NO: 13802), ASASPXX (SEQ ID NO: 13648):VPQDL (SEQ ID NO: 13621):EPLP-AA¹⁷-VYY (SEQ ID NO: 13802), KIPKAXX (SEQ ID NO: 13655):VPTEL (SEQ ID NO: 13631):EPLP-AA¹⁷-VYY (SEQ ID NO: 13802), GIPEPXX (SEQ ID NO: 13650):VPEKM (SEQ ID NO: 13616):EPLP-AA¹⁷-VYY (SEQ ID NO: 13802), SIPKAXX (SEQ ID NO: 13660):VPTEL (SEQ ID NO: 13631):EPLP-AA¹⁷-VYY (SEQ ID NO: 13802), HVTKPTX (SEQ ID NO: 13653):APTKL (SEQ ID NO: 13579):EPLP-AA¹⁷-VYY (SEQ ID NO: 13802), YVPKPXX (SEQ ID NO: 13664):APTKL (SEQ ID NO: 13579):EPLP-AA¹⁷-VYY (SEQ ID NO: 13802), TVPKPXX (SEQ ID NO: 13663):APTQL (SEQ ID NO: 13582):EPLP-AA¹⁷-VYY (SEQ ID NO: 13802), AVPKAXX (SEQ ID NO: 13649):APTKL (SEQ ID NO: 13579):EPLP-AA¹⁷-VYY (SEQ ID NO: 13802), KVGKAXX (SEQ ID NO: 13656):VPTKL (SEQ ID NO: 13633):EPLP-AA¹⁷-VYY (SEQ ID NO: 13802), KASKAXX (SEQ ID NO: 13654):VPTKL (SEQ ID NO: 13633):EPLP-AA¹⁷-VYY (SEQ ID NO: 13802), GSAGPXX (SEQ ID NO: 13651):TPTKM (SEQ ID NO: 13598):EPLP-AA¹⁷-VYY (SEQ ID NO: 13802), AAPASXX (SEQ ID NO: 13646):VPARL (SEQ ID NO: 13611):EPLP-AA¹⁷-VYY (SEQ ID NO: 13802), STPPTXX (SEQ ID NO: 13662):VPTRL (SEQ ID NO: 13637):EPLP-AA¹⁷-VYY (SEQ ID NO: 13802), HVPKPXX (SEQ ID NO: 13652):APTKL (SEQ ID NO: 13579):EPLP-AA¹⁷-VYY (SEQ ID NO: 13802), RVPSTXX (SEQ ID NO: 13659):APVKT (SEQ ID NO: 13589):EPLP-AA¹⁷-VYY (SEQ ID NO: 13802), ASASPXX (SEQ ID NO: 13648):VSQDL (SEQ ID NO: 13639):EPLP-AA¹⁷-VYY (SEQ ID NO: 13802), NDEGLEX (SEQ ID NO: 13657):VPTEE (SEQ ID NO: 13630):EPLP-AA¹⁷-VYY (SEQ ID NO: 13802), NDEGLEX (SEQ ID NO: 13657):VPTGQ (SEQ ID NO: 13632):EPLP-AA¹⁷-VYY (SEQ ID NO: 13802), SSVKXQP (SEQ ID NO: 13661):SRVHH (SEQ ID NO: 13592):EPLP-AA¹⁷-VYY (SEQ ID NO: 13802), RNVQXRP (SEQ ID NO: 13658):TQVQL (SEQ ID NO: 13603):EPLP-AA¹⁷-VYY (SEQ ID NO: 13802), KIPKAXX (SEQ ID NO: 13655):VSQEL (SEQ ID NO: 13640):EPLT-AA¹⁷-LYY (SEQ ID NO: 13803), GIPEPXX (SEQ ID NO: 13650):VSQKM (SEQ ID NO: 13642):EPLT-AA¹⁷-LYY (SEQ ID NO: 13803), SIPKAXX (SEQ ID NO: 13660):VSQEL (SEQ ID NO: 13640):EPLT-AA¹⁷-LYY (SEQ ID NO: 13803), HVTKPTX (SEQ ID NO: 13653):VSQKL (SEQ ID NO: 13641):EPLT-AA¹⁷-LYY (SEQ ID NO: 13803), YVPKPXX (SEQ ID NO: 13664):VSQKL (SEQ ID NO: 13641):EPLT-AA¹⁷-LYY (SEQ ID NO: 13803), TVPKPXX (SEQ ID NO: 13663):VSQQL (SEQ ID NO: 13644):EPLT-AA¹⁷-LYY (SEQ ID NO: 13803), AVPKAXX (SEQ ID NO: 13649):VSQKL (SEQ ID NO: 13641):EPLT-AA¹⁷-LYY (SEQ ID NO: 13803), KVGKAXX (SEQ ID NO: 13656):VSQKL (SEQ ID NO: 13641):EPLT-AA¹⁷-LYY (SEQ ID NO: 13803), KASKAXX (SEQ ID NO: 13654):VSQKL (SEQ ID NO: 13641):EPLT-AA¹⁷-LYY (SEQ ID NO: 13803), GSAGPXX (SEQ ID NO: 13651):VSQKM (SEQ ID NO: 13642):EPLT-AA¹⁷-LYY (SEQ ID NO: 13803), AAPASXX (SEQ ID NO: 13646):VSQRL (SEQ ID NO: 13645):EPLT-AA¹⁷-LYY (SEQ ID NO: 13803), STPPTXX (SEQ ID NO: 13662):VSQRL (SEQ ID NO: 13645):EPLT-AA¹⁷-LYY (SEQ ID NO: 13803), HVPKPXX (SEQ ID NO: 13652):VSQKL (SEQ ID NO: 13641):EPLT-AA¹⁷-LYY (SEQ ID NO: 13803), RVPSTXX (SEQ ID NO: 13659):VSQKT (SEQ ID NO: 13643):EPLT-AA¹⁷-LYY (SEQ ID NO: 13803), ASAAPXX (SEQ ID NO: 13647):VSQAL (SEQ ID NO: 13638):EPLT-AA¹⁷-LYY (SEQ ID NO: 13803), ASASPXX (SEQ ID NO: 13648):VSQDL (SEQ ID NO: 13639):EPLT-AA¹⁷-LYY (SEQ ID NO: 13803), KIPKAXX (SEQ ID NO: 13655):VPTEL (SEQ ID NO: 13631):EPLT-AA¹⁷-LYY (SEQ ID NO: 13803), GIPEPXX (SEQ ID NO: 13650):VPEKM (SEQ ID NO: 13616):EPLT-AA¹⁷-LYY (SEQ ID NO: 13803), SIPKAXX (SEQ ID NO: 13660):VPTEL (SEQ ID NO: 13631):EPLT-AA¹⁷-LYY (SEQ ID NO: 13803), HVTKPTX (SEQ ID NO: 13653):APTKL (SEQ ID NO: 13579):EPLT-AA¹⁷-LYY (SEQ ID NO: 13803), YVPKPXX (SEQ ID NO: 13664):APTKL (SEQ ID NO: 13579):EPLT-AA¹⁷-LYY (SEQ ID NO: 13803), TVPKPXX (SEQ ID NO: 13663):APTQL (SEQ ID NO: 13582):EPLT-AA¹⁷-LYY (SEQ ID NO: 13803), AVPKAXX (SEQ ID NO: 13649):APTKL (SEQ ID NO: 13579):EPLT-AA¹⁷-LYY (SEQ ID NO: 13803), KVGKAXX (SEQ ID NO: 13656):VPTKL (SEQ ID NO: 13633):EPLT-AA¹⁷-LYY (SEQ ID NO: 13803), KASKAXX (SEQ ID NO: 13654):VPTKL (SEQ ID NO: 13633):EPLT-AA¹⁷-LYY (SEQ ID NO: 13803), GSAGPXX (SEQ ID NO: 13651):TPTKM (SEQ ID NO: 13598):EPLT-AA¹⁷-LYY (SEQ ID NO: 13803), AAPASXX (SEQ ID NO: 13646):VPARL (SEQ ID NO: 13611):EPLT-AA¹⁷-LYY (SEQ ID NO: 13803), STPPTXX (SEQ ID NO: 13662):VPTRL (SEQ ID NO: 13637):EPLT-AA¹⁷-LYY (SEQ ID NO: 13803), HVPKPXX (SEQ ID NO: 13652):APTKL (SEQ ID NO: 13579):EPLT-AA¹⁷-LYY (SEQ ID NO: 13803), RVPSTXX (SEQ ID NO: 13659):APVKT (SEQ ID NO: 13589):EPLT-AA¹⁷-LYY (SEQ ID NO: 13803), ASAAPXX (SEQ ID NO: 13647):VPQAL (SEQ ID NO: 13620):EPLT-AA¹⁷-LYY (SEQ ID NO: 13803), NDEGLEX (SEQ ID NO: 13657):VPTEE (SEQ ID NO: 13630):EPLT-AA¹⁷-LYY (SEQ ID NO: 13803), NDEGLEX (SEQ ID NO: 13657):VPTGQ (SEQ ID NO: 13632):EPLT-AA¹⁷-LYY (SEQ ID NO: 13803), SSVKXQP (SEQ ID NO: 13661):SRVHH (SEQ ID NO: 13592):EPLT-AA¹⁷-LYY (SEQ ID NO: 13803), RNVQXRP (SEQ ID NO: 13658):TQVQL (SEQ ID NO: 13603):EPLT-AA¹⁷-LYY (SEQ ID NO: 13803), KIPKAXX (SEQ ID NO: 13655):VPQEL (SEQ ID NO: 13622):EPLT-AA¹⁷-LYY (SEQ ID NO: 13803), GIPEPXX (SEQ ID NO: 13650):VPQKM (SEQ ID NO: 13624):EPLT-AA¹⁷-LYY (SEQ ID NO: 13803), SIPKAXX (SEQ ID NO: 13660):VPQEL (SEQ ID NO: 13622):EPLT-AA¹⁷-LYY (SEQ ID NO: 13803), HVTKPTX (SEQ ID NO: 13653):VPQKL (SEQ ID NO: 13623):EPLT-AA¹⁷-LYY (SEQ ID NO: 13803), YVPKPXX (SEQ ID NO: 13664):VPQKL (SEQ ID NO: 13623):EPLT-AA¹⁷-LYY (SEQ ID NO: 13803), TVPKPXX (SEQ ID NO: 13663):VPQQL (SEQ ID NO: 13626):EPLT-AA¹⁷-LYY (SEQ ID NO: 13803), AVPKAXX (SEQ ID NO: 13649):VPQKL (SEQ ID NO: 13623):EPLT-AA¹⁷-LYY (SEQ ID NO: 13803), KVGKAXX (SEQ ID NO: 13656):VPQKL (SEQ ID NO: 13623):EPLT-AA¹⁷-LYY (SEQ ID NO: 13803), KASKAXX (SEQ ID NO: 13654):VPQKL (SEQ ID NO: 13623):EPLT-AA¹⁷-LYY (SEQ ID NO: 13803), GSAGPXX (SEQ ID NO: 13651):VPQKM (SEQ ID NO: 13624):EPLT-AA¹⁷-LYY (SEQ ID NO: 13803), AAPASXX (SEQ ID NO: 13646):VPQRL (SEQ ID NO: 13627):EPLT-AA¹⁷-LYY (SEQ ID NO: 13803), STPPTXX (SEQ ID NO: 13662):VPQRL (SEQ ID NO: 13627):EPLT-AA¹⁷-LYY (SEQ ID NO: 13803), HVPKPXX (SEQ ID NO: 13652):VPQKL (SEQ ID NO: 13623):EPLT-AA¹⁷-LYY (SEQ ID NO: 13803), RVPSTXX (SEQ ID NO: 13659):VPQKT (SEQ ID NO: 13625):EPLT-AA¹⁷-LYY (SEQ ID NO: 13803), ASASPXX (SEQ ID NO: 13648):VPQDL (SEQ ID NO: 13621):EPLT-AA¹⁷-LYY (SEQ ID NO: 13803), NDEGLEX (SEQ ID NO: 13657):VPTGQ (SEQ ID NO: 13632):SNIT-AA¹⁷-QIM (SEQ ID NO: 13810), GIPEPXX (SEQ ID NO: 13650):VPEKM (SEQ ID NO: 13616):SNIT-AA¹⁷-QIM (SEQ ID NO: 13810), HVTKPTX (SEQ ID NO: 13653):APTKL (SEQ ID NO: 13579):SNIT-AA¹⁷-QIM (SEQ ID NO: 13810), YVPKPXX (SEQ ID NO: 13664):APTKL (SEQ ID NO: 13579):SNIT-AA¹⁷-QIM (SEQ ID NO: 13810), TVPKPXX (SEQ ID NO: 13663):APTQL (SEQ ID NO: 13582):SNIT-AA¹⁷-QIM (SEQ ID NO: 13810), AVPKAXX (SEQ ID NO: 13649):APTKL (SEQ ID NO: 13579):SNIT-AA¹⁷-QIM (SEQ ID NO: 13810), GSAGPXX (SEQ ID NO: 13651):TPTKM (SEQ ID NO: 13598):SNIT-AA¹⁷-QIM (SEQ ID NO: 13810), AAPASXX (SEQ ID NO: 13646):VPARL (SEQ ID NO: 13611):SNIT-AA¹⁷-QIM (SEQ ID NO: 13810), HVPKPXX (SEQ ID NO: 13652):APTKL (SEQ ID NO: 13579):SNIT-AA¹⁷-QIM (SEQ ID NO: 13810), RVPSTXX (SEQ ID NO: 13659):APVKT (SEQ ID NO: 13589):SNIT-AA¹⁷-QIM (SEQ ID NO: 13810), ASAAPXX (SEQ ID NO: 13647):VPQAL (SEQ ID NO: 13620):SNIT-AA¹⁷-QIM (SEQ ID NO: 13810), ASASPXX (SEQ ID NO: 13648):VSQDL (SEQ ID NO: 13639):SNIT-AA¹⁷-QIM (SEQ ID NO: 13810), ASASPXX (SEQ ID NO: 13648):VPQDL (SEQ ID NO: 13621):SNIT-AA¹⁷-QIM (SEQ ID NO: 13810), SSVKXQP (SEQ ID NO: 13661):SRVHH (SEQ ID NO: 13592):SNIT-AA¹⁷-QIM (SEQ ID NO: 13810), RNVQXRP (SEQ ID NO: 13658):TQVQL (SEQ ID NO: 13603):SNIT-AA¹⁷-QIM (SEQ ID NO: 13810), RNVQXRP (SEQ ID NO: 13658):SRVQL (SEQ ID NO: 13593):RSVK-AA¹⁷-AKV (SEQ ID NO: 13807), KIPKAXX (SEQ ID NO: 13655):VPTEL (SEQ ID NO: 13631):RSVK-AA¹⁷-AKV (SEQ ID NO: 13807), GIPEPXX (SEQ ID NO: 13650):VPEKM (SEQ ID NO: 13616):RSVK-AA¹⁷-AKV (SEQ ID NO: 13807), SIPKAXX (SEQ ID NO: 13660):VPTEL (SEQ ID NO: 13631):RSVK-AA¹⁷-AKV (SEQ ID NO: 13807), HVTKPTX (SEQ ID NO: 13653):APTKL (SEQ ID NO: 13579):RSVK-AA¹⁷-AKV (SEQ ID NO: 13807), YVPKPXX (SEQ ID NO: 13664):APTKL (SEQ ID NO: 13579):RSVK-AA¹⁷-AKV (SEQ ID NO: 13807), TVPKPXX (SEQ ID NO: 13663):APTQL (SEQ ID NO: 13582):RSVK-AA¹⁷-AKV (SEQ ID NO: 13807), AVPKAXX (SEQ ID NO: 13649):APTKL (SEQ ID NO: 13579):RSVK-AA¹⁷-AKV (SEQ ID NO: 13807), KVGKAXX (SEQ ID NO: 13656):VPTKL (SEQ ID NO: 13633):RSVK-AA¹⁷-AKV (SEQ ID NO: 13807), KASKAXX (SEQ ID NO: 13654):VPTKL (SEQ ID NO: 13633):RSVK-AA¹⁷-AKV (SEQ ID NO: 13807), GSAGPXX (SEQ ID NO: 13651):TPTKM (SEQ ID NO: 13598):RSVK-AA¹⁷-AKV (SEQ ID NO: 13807), AAPASXX (SEQ ID NO: 13646):VPARL (SEQ ID NO: 13611):RSVK-AA¹⁷-AKV (SEQ ID NO: 13807), STPPTXX (SEQ ID NO: 13662):VPTRL (SEQ ID NO: 13637):RSVK-AA¹⁷-AKV (SEQ ID NO: 13807), HVPKPXX (SEQ ID NO: 13652):APTKL (SEQ ID NO: 13579):RSVK-AA¹⁷-AKV (SEQ ID NO: 13807), RVPSTXX (SEQ ID NO: 13659):APVKT (SEQ ID NO: 13589):RSVK-AA¹⁷-AKV (SEQ ID NO: 13807), ASAAPXX (SEQ ID NO: 13647):VPQAL (SEQ ID NO: 13620):RSVK-AA¹⁷-AKV (SEQ ID NO: 13807), ASASPXX (SEQ ID NO: 13648):VSQDL (SEQ ID NO: 13639):RSVK-AA¹⁷-AKV (SEQ ID NO: 13807), ASASPXX (SEQ ID NO: 13648):VPQDL (SEQ ID NO: 13621):RSVK-AA¹⁷-AKV (SEQ ID NO: 13807), NDEGLEX (SEQ ID NO: 13657):VPTEE (SEQ ID NO: 13630):RSVK-AA¹⁷-AKV (SEQ ID NO: 13807), NDEGLEX (SEQ ID NO: 13657):VPTGQ (SEQ ID NO: 13632):RSVK-AA¹⁷-AKV (SEQ ID NO: 13807), RNVQXRP (SEQ ID NO: 13658):TQVQL (SEQ ID NO: 13603):RSVK-AA¹⁷-AKV (SEQ ID NO: 13807), SSVKXQP (SEQ ID NO: 13661):TQVHH (SEQ ID NO: 13602):RPVQ-AA¹⁷-RKI (SEQ ID NO: 13806), KIPKAXX (SEQ ID NO: 13655):VPTEL (SEQ ID NO: 13631):RPVQ-AA¹⁷-RKI (SEQ ID NO: 13806), GIPEPXX (SEQ ID NO: 13650):VPEKM (SEQ ID NO: 13616):RPVQ-AA¹⁷-RKI (SEQ ID NO: 13806), SIPKAXX (SEQ ID NO: 13660):VPTEL (SEQ ID NO: 13631):RPVQ-AA¹⁷-RKI (SEQ ID NO: 13806), HVTKPTX (SEQ ID NO: 13653):APTKL (SEQ ID NO: 13579):RPVQ-AA¹⁷-RKI (SEQ ID NO: 13806), YVPKPXX (SEQ ID NO: 13664):APTKL (SEQ ID NO: 13579):RPVQ-AA¹⁷-RKI (SEQ ID NO: 13806), TVPKPXX (SEQ ID NO: 13663):APTQL (SEQ ID NO: 13582):RPVQ-AA¹⁷-RKI (SEQ ID NO: 13806), AVPKAXX (SEQ ID NO: 13649):APTKL (SEQ ID NO: 13579):RPVQ-AA¹⁷-RKI (SEQ ID NO: 13806), KVGKAXX (SEQ ID NO: 13656):VPTKL (SEQ ID NO: 13633):RPVQ-AA¹⁷-RKI (SEQ ID NO: 13806), KASKAXX (SEQ ID NO: 13654):VPTKL (SEQ ID NO: 13633):RPVQ-AA¹⁷-RKI (SEQ ID NO: 13806), GSAGPXX (SEQ ID NO: 13651):TPTKM (SEQ ID NO: 13598):RPVQ-AA¹⁷-RKI (SEQ ID NO: 13806), AAPASXX (SEQ ID NO: 13646):VPARL (SEQ ID NO: 13611):RPVQ-AA¹⁷-RKI (SEQ ID NO: 13806), STPPTXX (SEQ ID NO: 13662):VPTRL (SEQ ID NO: 13637):RPVQ-AA¹⁷-RKI (SEQ ID NO: 13806), HVPKPXX (SEQ ID NO: 13652):APTKL (SEQ ID NO: 13579):RPVQ-AA¹⁷-RKI (SEQ ID NO: 13806), RVPSTXX (SEQ ID NO: 13659):APVKT (SEQ ID NO: 13589):RPVQ-AA¹⁷-RKI (SEQ ID NO: 13806), ASAAPXX (SEQ ID NO: 13647):VPQAL (SEQ ID NO: 13620):RPVQ-AA¹⁷-RKI (SEQ ID NO: 13806), ASASPXX (SEQ ID NO: 13648):VSQDL (SEQ ID NO: 13639):RPVQ-AA¹⁷-RKI (SEQ ID NO: 13806), ASASPXX (SEQ ID NO: 13648):VPQDL (SEQ ID NO: 13621):RPVQ-AA¹⁷-RKI (SEQ ID NO: 13806), NDEGLEX (SEQ ID NO: 13657):VPTEE (SEQ ID NO: 13630):RPVQ-AA¹⁷-RKI (SEQ ID NO: 13806), NDEGLEX (SEQ ID NO: 13657):VPTGQ (SEQ ID NO: 13632):RPVQ-AA¹⁷-RKI (SEQ ID NO: 13806) and SSVKXQP (SEQ ID NO: 13661):SRVHH (SEQ ID NO: 13592):RPVQ-AA17-RKI (SEQ ID NO: 13806); and wherein AA¹⁷ is selected from the group consisting of G, A, V, L, I, P, F, M, W, T and S (in particular is selected from the group consisting of M, I, L, V and T).

[0313] In certain embodiments, PEP11 is a peptide with 3 amino acids of general formula AA¹⁸-AA¹⁹-AA²⁰; wherein AA¹⁸ is selected from the group consisting of L, V, Q, A and R; wherein AA¹⁹ is selected from the group consisting of F, W, H, Y, I and K; wherein AA²⁰ is selected from the group consisting of L, F, Y, K, I, V and M. In one particular example, PEP11 is selected from the group consisting of LYL, LFF, LYF, LYY, LYK, LYI, LFI, LYV, VYY, QIM, AKV and RKI.

[0314] In certain embodiments, PEP1 is selected from the group consisting of SAIS (SEQ ID NO: 13570), SSLS (SEQ ID NO: 13575), NAIS (SEQ ID NO: 13567), SATS (SEQ ID NO: 13571), SPIS (SEQ ID NO: 13574), EPIS (SEQ ID NO: 13563), SPIN (SEQ ID NO: 13573), KPLS (SEQ ID NO: 13566), EPLP (SEQ ID NO: 13564), EPLT (SEQ ID NO: 13565), SNIT (SEQ ID NO: 13572), RSVK (SEQ ID NO: 13569) and RPVQ (SEQ ID NO: 13568); PEP11 is selected from the group consisting of LYL, LFF, LYF, LYY, LYK, LYI, LFI, LYV, VYY, QIM, AKV and RKI; and the pair PEP1:PEP11 is selected from the group consisting of SAIS (SEQ ID NO: 13570):LYL, SSLS (SEQ ID NO: 13575):LFF, NAIS (SEQ ID NO: 13567):LYF, SATS (SEQ ID NO: 13571):LYY, SPIS (SEQ ID NO: 13574):LYK, SPIS (SEQ ID NO: 13574):LYI, SPIS (SEQ ID NO: 13574):LFI, EPIS (SEQ ID NO: 13563):LYL, SPIN (SEQ ID NO: 13573):LYF, KPLS (SEQ ID NO: 13566):LYV, EPLP (SEQ ID NO: 13564):VYY, EPLT (SEQ ID NO: 13565):LYY, SNIT (SEQ ID NO: 13572):QIM, RSVK (SEQ ID NO: 13569):AKV and RPVQ (SEQ ID NO: 13568):RKI.

[0315] In one particular example, said GFR-binding compound is a peptide, a variant or analog thereof, or a peptidomimetic as defined herein, with (comprising, or exclusively consisting of, or constituted of) between 8 and 30 (in particular between 8-25 or between 8-22, more particularly between 18-22, even more particularly between 19-21 or 20) amino acids, having the following general formula (III) (hereinafter may also be referred to as compound (III) or peptide (III)):

AA¹-AA²-AA³-AA⁴-AA⁵-AA⁶-AA⁷-AA⁸-AA⁹-AA¹⁰-AA¹¹-AA¹²-AA¹³-AA¹⁴-AA¹⁵-AA¹⁶-AA¹⁷-AA¹⁸-AA¹⁹-AA²⁰ (III)

wherein AA¹-AA²-AA³-AA⁴-AA⁵-AA⁶-AA⁷ (SEQ ID NO: 13816) is PEP7 as defined herein; wherein AA¹³-AA¹⁴-AA¹⁵-AA¹⁶-AA¹⁷-AA¹⁸-AA¹⁹-AA²⁰ is PEP12 as defined herein; wherein AA⁸-AA⁹-AA¹⁰ is PEP3 as defined herein; wherein AA¹¹ and AA¹² are as defined herein; wherein AA¹ may be an N-terminal amino acid or a C-terminal amino acid; wherein AA²⁰ may be an N-terminal amino acid or a C-terminal amino acid.

[0316] In one most particular example, the RMSD value of the three dimensional (3D) atomic coordinates of said GFR-binding compound as defined herein with respect to PEPREF is 2.45 Å (Angstroms) or less, in particular is 2 Å or less, and more particularly is 1.79 Å or less, and wherein PEPREF is the set of 3D atomic coordinates already defined herein (hereinafter may be referred to as “wherein the RMSD is 2.45 Å or less” for the sake of conciseness).

[0317] In one example, said GFR-binding compound is a synthetic molecule as defined herein in the definition section.

[0318] In one particular example, said GFR-binding compound is a synthetic peptide, or a variant or analog thereof, or a peptidomimetic.

[0319] In one most particular example, said GFR-binding compound is a non-cyclic synthetic peptide.

[0320] In one example, a length of said GFR-binding compound, in solution, such as in a physiologically acceptable solvent such as water or PBS, is comprised between about 6 and about 20 nm, preferably between about 6 and about 16 nm, as determined using the standard «3D» procedure described above.

[0321] In one particular example, said GFR-binding compounds may be any one or a plurality of peptides of SEQ ID NO: 1 to 4802

### Cyclic GFR-Binding Compounds

[0322] In one example, said cyclic GFR-binding compound has a molecular weight of less than 5,000 Daltons. In one particular example, said cyclic GFR-binding compound has a molecular weight of less than 4,000 Daltons. In one particular example, said cyclic GFR-binding compound has a molecular weight comprised between 1,000 and 5,000 Daltons. In one particular example, said cyclic GFR-binding compound has a molecular weight comprised between 1,000 and 4,000 Daltons.

[0323] In one example, said cyclic GFR-binding compound has a molecular weight of less than 7,000 Daltons. In one example, said cyclic GFR-binding compound has a molecular weight of less than 6,000 Daltons. In one example, said cyclic GFR-binding compound has a molecular weight of less than 5,000 Daltons. In one particular example, said cyclic GFR-binding compound has a molecular weight comprised between 1,000 and 7,000 Daltons. In one particular example, said cyclic GFR-binding compound has a molecular weight comprised between 1,000 and 6,000 Daltons. In one particular example, said cyclic GFR-binding compound has a molecular weight comprised between 2,000 and 7,000 Daltons. In one particular example, said cyclic GFR-binding compound has a molecular weight comprised between 2,000 and 6,000 Daltons.

[0324] In one particular example, the growth factor receptor involved in the interaction with said cyclic GFR-binding compound is an epidermal growth factor receptor. In one particular example, the growth factor receptor involved in the interaction with said cyclic GFR-binding compound is a fibroblast growth factor receptor. In one particular example, the growth factor receptor involved in the interaction with said cyclic GFR-binding compound is a vascular endothelial growth factor receptor. In one particular example, the growth factor receptor involved in the interaction with said cyclic GFR-binding compound is a nerve growth factor receptor. In one particular example, the growth factor receptor involved in the interaction with said cyclic GFR-binding compound is a hepatocyte growth factor receptor. In one particular example, the growth factor receptor involved in the interaction with said cyclic GFR-binding compound is a somatomedin or insulin-like growth factor receptor. In one particular example, the growth factor receptor involved in the interaction with said cyclic GFR-binding compound is a platelet-derived growth factor receptor. In one particular example, the growth factor receptor involved in the interaction with said cyclic GFR-binding compound is a protein from the transforming growth factor beta (TGF-β) superfamily.

[0325] In one particular example, the growth factor receptor(s) involved in the interaction with said cyclic GFR-binding compound is (are) preferably selected from epidermal growth factor receptors, fibroblast growth factor receptors, vascular endothelial growth factor receptors, nerve growth factor receptors, hepatocyte growth factor receptors, somatomedin or insulin-like growth factor receptors, platelet-derived growth factor receptors, and transforming growth factor beta (TGF-β) superfamily proteins.

[0326] In one particular example, said cyclic GFR-binding compound is a peptide, or a variant or analog thereof, having growth factor receptor-binding capability or capabilities, with (exclusively consisting of, or constituted of) between 10-60 amino acids, in particular between 10-55 amino acids, more particularly between 15-60 amino acids, and even more particularly between 15-55 amino acids, or between 10-35 amino acids, in particular between 15-35 amino acids, more particularly between 10-30 amino acids, and even more particularly between 15-30 amino acids.

[0327] In one particular example, said cyclic GFR-binding compound is a cyclic peptidomimetic as defined herein, having growth factor receptor-binding capability or capabilities, comprising (consecutively or non consecutively) between 10-60 amino acids, in particular between 10-55 amino acids, more particularly between 15-60 amino acids, and even more particularly between 15-55 amino acids, or between 10-35 amino acids, in particular between 15-35 amino acids, more particularly between 10-30 amino acids, and even more particularly between 15-30 amino acids; wherein said cyclic GFR-binding compound has a molecular weight comprised between 1,000 and 7,000 Daltons (in particular, between 1,000 and 6,000 Da).

[0328] In one particular example, said cyclic GFR-binding compound is a cyclic peptidomimetic as defined herein, having growth factor receptor-binding capability or capabilities, comprising (consecutively or non consecutively) between 10-60 amino acids, in particular between 10-55 amino acids, more particularly between 15-60 amino acids, and even more particularly between 15-55 amino acids, or between 10-35 amino acids, in particular between 15-35 amino acids, more particularly between 10-30 amino acids, and even more particularly between 15-30 amino acids; and containing at least one peptide portion or fragment with between 5-20 amino acids (in particular containing one peptide portion or fragment with between 5-20 amino acids); wherein said cyclic GFR-binding compound has a molecular weight comprised between 1,000 and 7,000 Daltons (in particular, between 1,000 and 6,000 Da).

[0329] In one aspect, the present disclosure provides a cyclic GFR-binding compound, wherein said cyclic GFR-binding compound is a cyclic peptide, a variant or analog thereof, or a cyclic peptidomimetic as defined herein, having growth factor receptor-binding capability or capabilities, having a molecular weight of less than 7,000 Da, in particular of between 1,000 and 7,000 Da, more particularly of between 1,000 and 6,000 Da.

[0330] In one aspect, the present disclosure provides a cyclic GFR-binding compound, wherein said cyclic GFR-binding compound is a cyclic peptide, a variant or analog thereof, or a cyclic peptidomimetic as defined herein, having growth factor receptor-binding capability or capabilities, with between 10-60 (in particular between 15-60, more particularly between 10-55, and even more particularly between 15-55) amino acids or with between 10-35 (in particular between 15-35, more particularly between 10-30, and even more particularly between 15-30) amino acids, comprising a peptide with four amino acids (PEP1).

[0331] In one aspect, the present disclosure provides a cyclic GFR-binding compound, wherein said cyclic GFR-binding compound is a cyclic peptide, a variant or analog thereof, or a cyclic peptidomimetic as defined herein, with between 10-60 (in particular between 15-60, more particularly between 10-55, and even more particularly between 15-55) amino acids or with between 10-35 (in particular between 15-35, more particularly between 10-30, and even more particularly between 15-30) amino acids, comprising a peptide with eight amino acids (PEP12).

[0332] In one aspect, the present disclosure provides a cyclic GFR-binding compound, wherein said cyclic GFR-binding compound is a cyclic peptide, a variant or analog thereof, or a cyclic peptidomimetic as defined herein, with between 10-60 (in particular between 15-60, more particularly between 10-55, and even more particularly between 15-55) amino acids or with between 10-35 (in particular between 15-35, more particularly between 10-30, and even more particularly between 15-30) amino acids, comprising a peptide with four amino acids (PEP1); wherein said cyclic GFR-binding compound further comprises a peptide with three amino acids (PEP3).

[0333] In one aspect, the present disclosure provides a cyclic GFR-binding compound, wherein said cyclic GFR-binding compound is a cyclic peptide, a variant or analog thereof, or a cyclic peptidomimetic as defined herein, with between 10-60 (in particular between 15-60, more particularly between 10-55, and even more particularly between 15-55) amino acids or with between 10-35 (in particular between 15-35, more particularly between 10-30, and even more particularly between 15-30) amino acids, comprising a peptide with eight amino acids (PEP12); wherein said cyclic GFR-binding compound further comprises a peptide with three amino acids (PEP3).

[0334] In one aspect, the present disclosure provides a cyclic GFR-binding compound, wherein said cyclic GFR-binding compound is a cyclic peptide, a variant or analog thereof, or a cyclic peptidomimetic as defined herein, with between 10-60 (in particular between 15-60, more particularly between 10-55, and even more particularly between 15-55) amino acids or with between 10-35 (in particular between 15-35, more particularly between 10-30, and even more particularly between 15-30) amino acids, comprising a peptide with four amino acids (PEP1); wherein said cyclic GFR-binding compound further comprises a peptide with five amino acids (PEP5).

[0335] In one aspect, the present disclosure provides a cyclic GFR-binding compound, wherein said cyclic GFR-binding compound is a cyclic peptide, a variant or analog thereof, or a cyclic peptidomimetic as defined herein, with between 10-60 (in particular between 15-60, more particularly between 10-55, and even more particularly between 15-55) amino acids or with between 10-35 (in particular between 15-35, more particularly between 10-30, and even more particularly between 15-30) amino acids, comprising a peptide with eight amino acids (PEP12); wherein said cyclic GFR-binding compound further comprises a peptide with five amino acids (PEP5).

[0336] In one aspect, the present disclosure provides a cyclic GFR-binding compound, wherein said cyclic GFR-binding compound is a cyclic peptide, a variant or analog thereof, or a cyclic peptidomimetic as defined herein, with between 10-60 (in particular between 15-60, more particularly between 10-55, and even more particularly between 15-55) amino acids or with between 10-35 (in particular between 15-35, more particularly between 10-30, and even more particularly between 15-30) amino acids, comprising a peptide with four amino acids (PEP1); wherein said cyclic GFR-binding compound further comprises a peptide with between six and twelve amino acids (PEP9).

[0337] In one aspect, the present disclosure provides a cyclic GFR-binding compound, wherein said cyclic GFR-binding compound is a cyclic peptide, a variant or analog thereof, or a cyclic peptidomimetic as defined herein, with between 10-60 (in particular between 15-60, more particularly between 10-55, and even more particularly between 15-55) amino acids or with between 10-35 (in particular between 15-35, more particularly between 10-30, and even more particularly between 15-30) amino acids, comprising a peptide with eight amino acids (PEP12); wherein said cyclic GFR-binding compound further comprises a peptide with between six and twelve amino acids (PEP9).

[0338] In one aspect, the present disclosure provides a cyclic GFR-binding compound, wherein said cyclic GFR-binding compound is a cyclic peptide, a variant or analog thereof, or a cyclic peptidomimetic as defined herein, with between 10-60 (in particular between 15-60, more particularly between 10-55, and even more particularly between 15-55) amino acids or with between 10-35 (in particular between 15-35, more particularly between 10-30, and even more particularly between 15-30) amino acids, comprising a peptide with four amino acids (PEP1); wherein said cyclic GFR-binding compound further comprises a peptide with three amino acids (PEP3), and an amino acid or a peptide with between two and seven amino acids (PEP7).

[0339] In one aspect, the present disclosure provides a cyclic GFR-binding compound, wherein said cyclic GFR-binding compound is a cyclic peptide, a variant or analog thereof, or a cyclic peptidomimetic as defined herein, with between 10-60 (in particular between 15-60, more particularly between 10-55, and even more particularly between 15-55) amino acids or with between 10-35 (in particular between 15-35, more particularly between 10-30, and even more particularly between 15-30) amino acids, comprising a peptide with four amino acids (PEP12); wherein said cyclic GFR-binding compound further comprises a peptide with three amino acids (PEP3), and an amino acid or a peptide with between two and seven amino acids (PEP7).

[0340] In one aspect, the present disclosure provides a cyclic GFR-binding compound, wherein said cyclic GFR-binding compound is a cyclic peptide, a variant or analog thereof, or a cyclic peptidomimetic as defined herein, with between 10-60 (in particular between 15-60, more particularly between 10-55, and even more particularly between 15-55) amino acids or with between 10-35 (in particular between 15-35, more particularly between 10-30, and even more particularly between 15-30) amino acids, comprising a peptide with four amino acids (PEP1); wherein said cyclic GFR-binding compound further comprises a peptide with five amino acids (PEP5), and an amino acid or a peptide with between two and seven amino acids (PEP7).

[0341] In one aspect, the present disclosure provides a cyclic GFR-binding compound, wherein said cyclic GFR-binding compound is a cyclic peptide, a variant or analog thereof, or a cyclic peptidomimetic as defined herein, with between 10-60 (in particular between 15-60, more particularly between 10-55, and even more particularly between 15-55) amino acids or with between 10-35 (in particular between 15-35, more particularly between 10-30, and even more particularly between 15-30) amino acids, comprising a peptide with four amino acids (PEP12); wherein said cyclic GFR-binding compound further comprises a peptide with five amino acids (PEP5), and an amino acid or a peptide with between two and seven amino acids (PEP7).

[0342] In one aspect, the present disclosure provides a cyclic GFR-binding compound, wherein said cyclic GFR-binding compound is a cyclic peptide, a variant or analog thereof, or a cyclic peptidomimetic as defined herein, with between 10-60 (in particular between 15-60, more particularly between 10-55, and even more particularly between 15-55) amino acids or with between 10-35 (in particular between 15-35, more particularly between 10-30, and even more particularly between 15-30) amino acids, comprising a peptide, a variant or analog thereof, or a peptidomimetic having the following general formula (IIIa) (hereinafter may also be referred to as compound (IIIa) or peptide (IIIa)):

PEP(A)-LINKER (IIIa)

wherein one end of LINKER interacts covalently with one end of PEP(A); wherein PEP(A) comprises PEP1 or PEP12; wherein LINKER is a linear or branched organic divalent radical, moiety or compound having a molecular weight (Mw) comprised between 450 and 4,500 Daltons, in particular comprised between about 600 and about 4,500 Da, more particularly between about 600 and about 4,000 Da, and even more particularly between about 600 and about 3,500 Da.

[0343] In one aspect, the present disclosure provides a cyclic GFR-binding compound, wherein said cyclic GFR-binding compound is a cyclic peptide, a variant or analog thereof, or a cyclic peptidomimetic as defined herein, with between 10-60 (in particular between 15-60, more particularly between 10-55, and even more particularly between 15-55) amino acids or with between 10-35 (in particular between 15-35, more particularly between 10-30, and even more particularly between 15-30) amino acids, comprising a peptide, a variant or analog thereof, or a peptidomimetic having the following general formula (IIIb) (hereinafter may also be referred to as compound (IIIb) or peptide (IIIb)):

LINKER-PEP(A)-LINKER (IIIb)

wherein one end of a first LINKER interacts covalently with one end of PEP(A); wherein one end of a second LINKER interacts covalently with another end of PEP(A); wherein another end of a first LINKER interacts covalently with another end of a second LINKER; wherein PEP(A) comprises PEP1 or PEP12; wherein LINKER are independently a linear or branched organic divalent radical, moiety or compound having a molecular weight (Mw) comprised between 450 and 4,500 Daltons, in particular comprised between about 600 and about 4,500 Da, more particularly between about 600 and about 4,000 Da, and even more particularly between about 600 and about 3,500 Da.

[0344] In the present description, the molecular weight of LINKER refer to the calculated molecular weight prior to being connected to/reacted with any of the elements it is configured to connect to or react with e.g. PEP(A), or any other groups defined herein.

[0345] In one aspect, the present disclosure provides a cyclic GFR-binding compound comprising compounds (IIIa) or (IIIb), wherein PEP(A) further comprises PEP3.

[0346] In one aspect, the present disclosure provides a cyclic GFR-binding compound comprising compounds (IIIa) or (IIIb), wherein PEP(A) further comprises PEP5.

[0347] In one aspect, the present disclosure provides a cyclic GFR-binding compound comprising compounds (IIIa) or (IIIb), wherein PEP(A) further comprises PEP9.

[0348] In one aspect, the present disclosure provides a cyclic GFR-binding compound comprising compounds (IIIa) or (IIIb), wherein PEP(A) further comprises PEP3 and PEP7.

[0349] In one aspect, the present disclosure provides a cyclic GFR-binding compound comprising compounds (IIIa) or (IIIb), wherein PEP(A) further comprises PEP5 and PEP7.

[0350] In one aspect, the present disclosure provides a cyclic GFR-binding compound, wherein said cyclic GFR-binding compound is a cyclic peptide, a variant or analog thereof, or a cyclic peptidomimetic as defined herein, with between 10-60 (in particular between 15-60, more particularly between 10-55, and even more particularly between 15-55) amino acids or with between 10-35 (in particular between 15-35, more particularly between 10-30, and even more particularly between 15-30) amino acids, comprising a peptide, a variant or analog thereof, or a peptidomimetic having the following general formula (IVa) (hereinafter may also be referred to as compound (IVa) or peptide (IVa)):

PEP(C)-PEP12-LINKER (IVa)

wherein LINKER is a linear or branched organic divalent radical, moiety or compound having a molecular weight (Mw) comprised between 450 and 4,500 Daltons, in particular comprised between about 600 and about 4,500 Da, more particularly between about 600 and about 4,000 Da, and even more particularly between about 600 and about 3,500 Da; wherein PEP12 is a peptide with 8 amino acids of formula PEP1-AA¹⁷-PEP11 as defined herein; wherein PEP2 is a peptide with five amino acids as already defined herein; wherein one end of PEP(C) interacts covalently with PEP12 via one end of PEP1; wherein one end of LINKER interacts covalently with one end of PEP12 via one end of PEP11; wherein PEP(C) is a peptide with at least 5 amino acids, in particular a peptide with between 5 and 12 amino acids.

[0351] In one aspect, the present disclosure provides a cyclic GFR-binding compound, wherein said cyclic GFR-binding compound is a cyclic peptide, a variant or analog thereof, or a cyclic peptidomimetic as defined herein, with between 10-60 (in particular between 15-60, more particularly between 10-55, and even more particularly between 15-55) amino acids or with between 10-35 (in particular between 15-35, more particularly between 10-30, and even more particularly between 15-30) amino acids, comprising a peptide, a variant or analog thereof, or a peptidomimetic having the following general formula (IVb) (hereinafter may also be referred to as compound (IVb) or peptide (IVb)):

LINKER-PEP(C)-PEP12-LINKER (IVb)

wherein LINKER are independently a linear or branched organic divalent radical, moiety or compound having a molecular weight (Mw) comprised between 450 and 4,500 Daltons, in particular comprised between about 600 and about 4,500 Da, more particularly between about 600 and about 4,000 Da, and even more particularly between about 600 and about 3,500 Da; wherein PEP12 is a peptide with 8 amino acids of formula PEP1-AA¹⁷-PEP11 as defined herein; wherein PEP2 is a peptide with five amino acids as already defined herein; wherein one end of PEP(C) interacts covalently with PEP12 via one end of PEP1; wherein one end of a first LINKER interacts covalently with one end of PEP12 via one end of PEP11; wherein one end of a second LINKER interacts covalently with another end of PEP(C); wherein another end of a first LINKER interacts covalently with another end of a second LINKER; wherein PEP(C) is a peptide with at least 5 amino acids, in particular a peptide with between 5 and 12 amino acids.

[0352] In one aspect, the present disclosure provides a cyclic GFR-binding compound comprising compound (IVa) or (IVb), wherein PEP(C) comprises PEP3.

[0353] In one aspect, the present disclosure provides a cyclic GFR-binding compound comprising compound (IVa) or (IVb), wherein PEP(C) comprises PEP5. In one particular example, PEP(C) is PEP5.

[0354] In one aspect, the present disclosure provides a cyclic GFR-binding compound comprising compound (IVa) or (IVb), wherein PEP(C) comprises PEP9. In one particular example, PEP(C) is PEP9.

[0355] In one aspect, the present disclosure provides a cyclic GFR-binding compound comprising compound (IVa) or (IVb), wherein PEP(C) comprises PEP3 and PEP7.

[0356] In one aspect, the present disclosure provides a cyclic GFR-binding compound comprising compound (IVa) or (IVb), wherein PEP(C) comprises PEP5 and PEP7.

[0357] In one aspect, the present disclosure provides a cyclic GFR-binding compound comprising compound (IVa) or (IVb), wherein PEP(C) is PEP5 or PEP9.

[0358] In one aspect, the present disclosure provides a cyclic GFR-binding compound, wherein said cyclic GFR-binding compound is a cyclic peptide, a variant or analog thereof, or a cyclic peptidomimetic as defined herein, with between 10-60 (in particular between 15-60, more particularly between 10-55, and even more particularly between 15-55) amino acids or with between 10-35 (in particular between 15-35, more particularly between 10-30, and even more particularly between 15-30) amino acids, comprising a peptide, a variant or analog thereof, or a peptidomimetic having the following general formula (Va) (hereinafter may also be referred to as compound (Va) or peptide (Va)):

PEP7-PEP5-PEP12-LINKER (Va)

wherein LINKER is a linear or branched organic divalent radical, moiety or compound having a molecular weight (Mw) comprised between 450 and 4,500 Daltons, in particular comprised between about 600 and about 4,500 Da, more particularly between about 600 and about 4,000 Da, and even more particularly between about 600 and about 3,500 Da; wherein PEP12 is a peptide with 8 amino acids of formula PEP1-AA¹⁷-PEP11 as defined herein; wherein PEP5 is a peptide with five amino acids as already defined herein; wherein PEP7 an amino acid or a peptide with between two and seven amino acids as already defined herein; wherein one end of LINKER interacts covalently with one end of PEP12 via AA²⁰; wherein one end of PEP5 interacts covalently with another end of PEP12 via AA¹²; wherein another end of PEP5 interacts covalently with one end of PEP7 via AA⁸.

[0359] In one aspect, the present disclosure provides a cyclic GFR-binding compound, wherein said cyclic GFR-binding compound is a cyclic peptide, a variant or analog thereof, or a cyclic peptidomimetic as defined herein, with between 10-60 (in particular between 15-60, more particularly between 10-55, and even more particularly between 15-55) amino acids or with between 10-35 (in particular between 15-35, more particularly between 10-30, and even more particularly between 15-30) amino acids, comprising a peptide, a variant or analog thereof, or a peptidomimetic having the following general formula (Vb) (hereinafter may also be referred to as compound (Vb) or peptide (Vb)):

LINKER-PEP7-PEP5-PEP12-LINKER (Vb)

wherein LINKER are independently a linear or branched organic divalent radical, moiety or compound having a molecular weight (Mw) comprised between 450 and 4,500 Daltons, in particular comprised between about 600 and about 4,500 Da, more particularly between about 600 and about 4,000 Da, and even more particularly between about 600 and about 3,500 Da; wherein PEP12 is a peptide with 8 amino acids of formula PEP1-AA¹⁷-PEP11 as defined herein; wherein PEP5 is a peptide with five amino acids as already defined herein; wherein PEP7 an amino acid or a peptide with between two and seven amino acids as already defined herein; wherein one end of PEP5 interacts covalently with another end of PEP12 via AA¹²; wherein another end of PEP5 interacts covalently with one end of PEP7 via AA⁸; wherein one end of a first LINKER interacts covalently with one end of PEP12 via AA²⁰; wherein one end of a second LINKER interacts covalently with another end of PEP7; wherein another end of a first LINKER interacts covalently with another end of a second LINKER.

[0360] In one aspect, the present disclosure provides a cyclic GFR-binding compound, wherein said cyclic GFR-binding compound is a cyclic peptide, a variant or analog thereof, or a cyclic peptidomimetic as defined herein, with between 10-60 (in particular between 15-60, more particularly between 10-55, and even more particularly between 15-55) amino acids or with between 10-35 (in particular between 15-35, more particularly between 10-30, and even more particularly between 15-30) amino acids, comprising a peptide, a variant or analog thereof, or a peptidomimetic having the following general formula (VIa) (hereinafter may also be referred to as compound (VIa) or peptide (VIa)):

AA¹-AA²-AA³-AA⁴-AA⁵-AA⁶-AA⁷-AA⁸-AA⁹-AA¹⁰-AA¹¹-AA¹²-AA¹³-AA¹⁴-AA¹⁵-AA¹⁶-AA¹⁷-AA¹⁸-AA¹⁹-AA²⁰-LINKER (VIa)

wherein LINKER is a linear or branched organic divalent radical, moiety or compound having a molecular weight (Mw) comprised between 450 and 4,500 Daltons, in particular comprised between about 600 and about 4,500 Da, more particularly between about 600 and about 4,000 Da, and even more particularly between about 600 and about 3,500 Da; wherein AA¹-AA²-AA³-AA⁴-AA⁵-AA⁶-AA⁷ (SEQ ID NO: 13816) is PEP7 as defined herein; wherein AA¹³-AA¹⁴-AA¹⁵-AA¹⁶-AA¹⁷-AA¹⁸-AA¹⁹-AA²⁰ is PEP12 as defined herein; wherein AA⁸-AA⁹-AA¹⁰ is PEP3 as defined herein; wherein AA¹¹ and AA¹² are as defined herein; wherein one end of LINKER interacts covalently with AA²⁰; wherein AA¹ may be an N-terminal amino acid or a C-terminal amino acid; wherein AA²⁰ may be an N-terminal amino acid or a C-terminal amino acid.

[0361] In one aspect, the present disclosure provides a cyclic GFR-binding compound, wherein said cyclic GFR-binding compound is a cyclic peptide, a variant or analog thereof, or a cyclic peptidomimetic as defined herein, with between 10-60 (in particular between 15-60, more particularly between 10-55, and even more particularly between 15-55) amino acids or with between 10-35 (in particular between 15-35, more particularly between 10-30, and even more particularly between 15-30) amino acids, comprising a peptide, a variant or analog thereof, or a peptidomimetic having the following general formula (VIb) (hereinafter may also be referred to as compound (VIb) or peptide (VIb)):

LINKER-AA¹-AA²-AA³-AA⁴-AA⁵-AA⁶-AA⁷-AA⁸-AA⁹-AA⁰-AA¹¹-AA²-AA³-AA⁴-AA⁵-AA⁶-AA¹⁷-AA⁸-AA¹′9-AA²⁰-LINKER (VIb)

wherein LINKER are independently a linear or branched organic divalent radical, moiety or compound having a molecular weight (Mw) comprised between 450 and 4,500 Daltons, in particular comprised between about 600 and about 4,500 Da, more particularly between about 600 and about 4,000 Da, and even more particularly between about 600 and about 3,500 Da; wherein AA¹-AA²-AA³-AA⁴-AA⁵-AA⁶-AA⁷ (SEQ ID NO: 13816) is PEP7 as defined herein; wherein AA¹³-AA¹⁴-AA¹⁵-AA¹⁶-AA¹⁷-AA¹⁸-AA¹⁹-AA²⁰ is PEP12 as defined herein; wherein AA⁸-AA⁹-AA¹⁰ is PEP3 as defined herein; wherein AA¹¹ and AA¹² are as defined herein; wherein one end of a first LINKER interacts covalently with AA²⁰; wherein one end of a second LINKER interacts covalently with AA¹; wherein another end of a first LINKER interacts covalently with another end of a second LINKER; wherein one end of the first LINKER may be an N-terminal amino acid or a C-terminal amino acid.

[0362] In one aspect, the present disclosure provides a cyclic GFR-binding compound, wherein said cyclic GFR-binding compound is a cyclic peptide, a variant or analog thereof, or a cyclic peptidomimetic as defined herein, with between 10-60 (in particular between 10-55, more particularly between 15-60, and even more particularly between 15-55) amino acids, or between 10-35 (in particular between 10-30, more particularly between 15-35, and even more particularly between 15-30) amino acids, comprising two LINKERs.

[0363] In one aspect, the present disclosure provides a cyclic GFR-binding compound, wherein said cyclic GFR-binding compound is a cyclic peptide, a variant or analog thereof, or a cyclic peptidomimetic as defined herein, with between 10-60 (in particular between 15-60, more particularly between 10-55, and even more particularly between 15-55) amino acids or with between 10-35 (in particular between 15-35, more particularly between 10-30, and even more particularly between 15-30) amino acids, having any one of the following schematic general formulae (VII) to (XX) (hereinafter may also be referred to as compounds (VII) to (XX) or peptides (VII) to (XX)):

[chemical structure]

[chemical structure]

wherein LINKER is a linear or branched organic divalent radical, moiety or compound having a molecular weight (Mw) comprised between 450 and 4,500 Daltons, in particular comprised between about 600 and about 4,500 Da, more particularly between about 600 and about 4,000 Da, and even more particularly between about 600 and about 3,500 Da; wherein PEP12 is a peptide with 8 amino acids of formula PEP1-AA¹⁷-PEP11 as defined herein; wherein PEP5 is a peptide with five amino acids as already defined herein; wherein PEP7 an amino acid or a peptide with between two and seven amino acids as already defined herein; wherein PEP9 is a peptide with between six and twelve amino acids; wherein curved lines represents covalent bonds between LINKER and PEP1 to PEP12. Curved lines' lengths may not be representative of the actual relative distance between the LINKERs and PEP1 to PEP12.

[0364] In one aspect, the present disclosure provides a cyclic GFR-binding compound, wherein said cyclic GFR-binding compound is a cyclic peptide, a variant or analog thereof, or a cyclic peptidomimetic as defined herein, with between 10-60 (in particular between 15-60, more particularly between 10-55, and even more particularly between 15-55) amino acids or with between 10-35 (in particular between 15-35, more particularly between 10-30, and even more particularly between 15-30) amino acids, having any one of the following schematic general formulae (XXI) to (XXIII) (hereinafter may also be referred to as compounds (XXI) to (XXIII) or peptides (XXI) to (XXIII)):

[chemical structure]

wherein LINKER is a linear or branched organic divalent radical, moiety or compound having a molecular weight (Mw) comprised between 450 and 4,500 Daltons, in particular comprised between about 600 and about 4,500 Da, more particularly between about 600 and about 4,000 Da, and even more particularly between about 600 and about 3,500 Da; wherein AA¹³-AA¹⁴-AA¹⁵-AA¹⁶-AA¹⁷-AA¹⁸-AA¹⁹-AA²⁰ is PEP12 as defined herein; wherein AA⁸-AA⁹-AA¹⁰ is PEP3 as defined herein; wherein AA¹¹ and AA¹² are as defined herein; wherein one end of LINKER interacts covalently with AA¹⁶ or AA²⁰; wherein another end of LINKER interacts covalently with AA⁸ or AA¹³; wherein curved lines represents covalent bonds between LINKER and AAs. Curved lines' lengths may not be representative of the actual relative distance between the LINKER and the AAs.

[0365] In certain embodiments, PEP1 is selected from the group consisting of SAIS (SEQ ID NO: 13570), SSLS (SEQ ID NO: 13575), NAIS (SEQ ID NO: 13567), SATS (SEQ ID NO: 13571), SPIS (SEQ ID NO: 13574), EPIS (SEQ ID NO: 13563), SPIN (SEQ ID NO: 13573), KPLS (SEQ ID NO: 13566), EPLP (SEQ ID NO: 13564), EPLT (SEQ ID NO: 13565), SNIT (SEQ ID NO: 13572), RSVK (SEQ ID NO: 13569) and RPVQ (SEQ ID NO: 13568).

[0366] In certain embodiments, PEP3 is selected from the group consisting of VPT, VPE, APT, TPT, VPA, APV, VPQ, VSQ, SRV and TQV.

[0367] In certain embodiments, PEP5 is a peptide of general formula PEP3-AA¹¹-AA¹²; wherein PEP3 is selected from the group consisting of VPT, VPE, APT, TPT, VPA, APV, VPQ, VSQ, SRV and TQV; wherein AA¹¹ is selected from the group consisting of E, K, Q, R, A, D, G and H; and wherein AA¹² is selected from the group consisting of L, M, T, E, Q and H. In one particular example, PEP5 is selected from the group consisting of VPTEL (SEQ ID NO: 13631), VPEKM (SEQ ID NO: 13616), APTKL (SEQ ID NO: 13579), APTQL (SEQ ID NO: 13582), VPTKL (SEQ ID NO: 13633), TPTKM (SEQ ID NO: 13598), VPARL (SEQ ID NO: 13611), VPTRL (SEQ ID NO: 13637), APVKT (SEQ ID NO: 13589), VPQAL (SEQ ID NO: 13620), VSQDL (SEQ ID NO: 13639), VPQDL (SEQ ID NO: 13621), VPTEE (SEQ ID NO: 13630), VPTGQ (SEQ ID NO: 13632), SRVHH (SEQ ID NO: 13592) and TQVQL (SEQ ID NO: 13603).

[0368] In certain embodiments, PEP7 is an amino acid or a peptide with between two and seven amino acids of general formula AA¹-AA²-AA³-AA⁴-AA⁵-AA⁶-AA⁷ (SEQ ID NO: 13816); wherein AA¹, AA², AA³, AA⁴, and AA⁵ are independently absent or AA^{I} as defined herein; wherein AA⁶ is absent or selected from the group consisting of S, T, C, E, Q, P and R; wherein AA⁷ is absent or is selected from the group consisting of S, T, C, E, Q, P and R, and wherein at least one of AA¹, AA², AA³, AA⁴, AA⁵, AA⁶ or AA⁷ is not absent. In one particular example, PEP7 is selected from the group consisting of KIPKAXX (SEQ ID NO: 13655), GIPEPXX (SEQ ID NO: 13650), SIPKAXX (SEQ ID NO: 13660), HVTKPTX (SEQ ID NO: 13653), YVPKPXX (SEQ ID NO: 13664), TVPKPXX (SEQ ID NO: 13663), AVPKAXX (SEQ ID NO: 13649), KVGKAXX (SEQ ID NO: 13656), KASKAXX (SEQ ID NO: 13654), GSAGPXX (SEQ ID NO: 13651), AAPASXX (SEQ ID NO: 13646), STPPTXX (SEQ ID NO: 13662), HVPKPXX (SEQ ID NO: 13652), RVPSTXX (SEQ ID NO: 13659), ASAAPXX (SEQ ID NO: 13647), ASASPXX (SEQ ID NO: 13648), NDEGLEX (SEQ ID NO: 13657), SSVKXQP (SEQ ID NO: 13661) and RNVQXRP (SEQ ID NO: 13658), wherein X is C or S throughout the present description.

[0369] In certain embodiments, PEP9 is a peptide of general formula PEP7-PEP5; wherein PEP5 is a peptide of formula PEP3-AA¹¹-AA¹²; wherein PEP3 is selected from the group consisting of VPT, VPE, APT, TPT, VPA, APV, VPQ, VSQ, SRV and TQV; wherein AA¹¹ is selected from the group consisting of E, K, Q, R, A, D, G and H; and wherein AA¹² is selected from the group consisting of L, M, T, E, Q and H; wherein PEP7 is an amino acid or a peptide with between two and seven amino acids of general formula AA¹-AA²-AA³-AA⁴-AA⁵-AA⁶-AA⁷ (SEQ ID NO: 13816); wherein AA¹, AA², AA³, AA⁴, and AA⁵ are independently absent or AA^{I} as defined herein; wherein AA⁶ is absent or selected from the group consisting of S, T, C, E, Q, P and R; wherein AA⁷ is absent or is selected from the group consisting of S, T, C, E, Q, P and R. In one particular example, PEP9 is selected from the group consisting of KIPKAXXVPTEL (SEQ ID NO: 13745), GIPEPXXVPEKM (SEQ ID NO: 13701), SIPKAXXVPTEL (SEQ ID NO: 13773), HVTKPTXAPTKL (SEQ ID NO: 13721), YVPKPXXAPTKL (SEQ ID NO: 13793), TVPKPXXAPTQL (SEQ ID NO: 13785), AVPKAXXAPTKL (SEQ ID NO: 13689), KVGKAXXVPTKL (SEQ ID NO: 13753), KASKAXXVPTKL (SEQ ID NO: 13737), GSAGPXXTPTKM (SEQ ID NO: 13707), AAPASXXVPARL (SEQ ID NO: 13668), STPPTXXVPTRL (SEQ ID NO: 13783), HVPKPXXAPTKL (SEQ ID NO: 13713), RVPSTXXAPVKT (SEQ ID NO: 13760), ASAAPXXVPQAL (SEQ ID NO: 13678), ASASPXXVSQDL (SEQ ID NO: 13688), ASASPXXVPQDL (SEQ ID NO: 13686), NDEGLEXVPTEE (SEQ ID NO: 13755), NDEGLEXVPTGQ (SEQ ID NO: 13756), SSVKXQPSRVHH (SEQ ID NO: 13775) and RNVQXRPTQVQL (SEQ ID NO: 13758), wherein X is C or S throughout the present description.

[0370] In certain embodiments, PEP12 is a peptide of general formula PEP1-AA¹⁷-PEP11; wherein AA¹⁷ is selected from the group consisting of G, A, V, L, I, P, F, M, W, T and S (in particular is selected from the group consisting of M, I, L, V and T); wherein PEP1 is selected from the group consisting of SAIS (SEQ ID NO: 13570), SSLS (SEQ ID NO: 13575), NAIS (SEQ ID NO: 13567), SATS (SEQ ID NO: 13571), SPIS (SEQ ID NO: 13574), EPIS (SEQ ID NO: 13563), SPIN (SEQ ID NO: 13573), KPLS (SEQ ID NO: 13566), EPLP (SEQ ID NO: 13564), EPLT (SEQ ID NO: 13565), SNIT (SEQ ID NO: 13572), RSVK (SEQ ID NO: 13569) and RPVQ (SEQ ID NO: 13568).

[0371] In certain embodiments, PEP11 is a peptide with 3 amino acids of general formula AA¹⁸-AA¹⁹-AA²⁰; wherein AA¹⁸ is selected from the group consisting of L, V, Q, A and R; wherein AA¹⁹ is selected from the group consisting of F, W, H, Y, I and K; wherein AA²⁰ is selected from the group consisting of L, F, Y, K, I, V and M. In one particular example, PEP11 is selected from the group consisting of LYL, LFF, LYF, LYY, LYK, LYI, LFI, LYV, VYY, QIM, AKV and RKI.

[0372] In certain embodiments, PEP7 is selected from the group consisting of KIPKAXX (SEQ ID NO: 13655), GIPEPXX (SEQ ID NO: 13650), SIPKAXX (SEQ ID NO: 13660), HVTKPTX (SEQ ID NO: 13653), YVPKPXX (SEQ ID NO: 13664), TVPKPXX (SEQ ID NO: 13663), AVPKAXX (SEQ ID NO: 13649), KVGKAXX (SEQ ID NO: 13656), KASKAXX (SEQ ID NO: 13654), GSAGPXX (SEQ ID NO: 13651), AAPASXX (SEQ ID NO: 13646), STPPTXX (SEQ ID NO: 13662), HVPKPXX (SEQ ID NO: 13652), RVPSTXX (SEQ ID NO: 13659), ASAAPXX (SEQ ID NO: 13647), ASASPXX (SEQ ID NO: 13648), NDEGLEX (SEQ ID NO: 13657), SSVKXQP (SEQ ID NO: 13661) and RNVQXRP (SEQ ID NO: 13658); wherein PEP8 is selected from the group consisting of GXGXR (SEQ ID NO: 13820), SXAXR (SEQ ID NO: 13821), SXGXH (SEQ ID NO: 13822), AXGXH (SEQ ID NO: 13823), XGXR (SEQ ID NO: 13824), EXGXR (SEQ ID NO: 13825), RXGXS (SEQ ID NO: 13826), AXGXR (SEQ ID NO: 13827), SXGXR (SEQ ID NO: 13828), XGXL (SEQ ID NO: 13829), XKXS (SEQ ID NO: 13830), KXEXR (SEQ ID NO: 13831), QXEXR (SEQ ID NO: 13832), LEXAXA (SEQ ID NO: 13833) and LAXKXE (SEQ ID NO: 13834); and wherein the pair PEP7:PEP8 is selected from the group consisting of KIPKAXX (SEQ ID NO: 13655):GXGXR (SEQ ID NO: 13820), GIPEPXX (SEQ ID NO: 13650):SXAXR (SEQ ID NO: 13821), SIPKAXX (SEQ ID NO: 13660):GXGXR (SEQ ID NO: 13820), HVTKPTX (SEQ ID NO: 13653):SXGXH (SEQ ID NO: 13822), YVPKPXX (SEQ ID NO: 13664):SXGXH (SEQ ID NO: 13822), TVPKPXX (SEQ ID NO: 13663):AXGXH (SEQ ID NO: 13823), AVPKAXX (SEQ ID NO: 13649):AXGXH (SEQ ID NO: 13823), KVGKAXX (SEQ ID NO: 13656):XGXR (SEQ ID NO: 13824), KASKAXX (SEQ ID NO: 13654):EXGXR (SEQ ID NO: 13825), GSAGPXX (SEQ ID NO: 13651):RXGXS (SEQ ID NO: 13826), AAPASXX (SEQ ID NO: 13646):AXGXR (SEQ ID NO: 13827), STPPTXX (SEQ ID NO: 13662):SXGXR (SEQ ID NO: 13828), HVPKPXX (SEQ ID NO: 13652):SXGXH (SEQ ID NO: 13822), RVPSTXX (SEQ ID NO: 13659):XGXL (SEQ ID NO: 13829), ASAAPXX (SEQ ID NO: 13647):XKXS (SEQ ID NO: 13830), ASASPXX (SEQ ID NO: 13648):XKXS (SEQ ID NO: 13830), NDEGLEX (SEQ ID NO: 13657):KXEXR (SEQ ID NO: 13831), NDEGLEX (SEQ ID NO: 13657):QXEXR (SEQ ID NO: 13832), SSVKXQP (SEQ ID NO: 13661):LEXAXA (SEQ ID NO: 13833) and RNVQXRP (SEQ ID NO: 13658):LAXKXE (SEQ ID NO: 13834).

[0373] In certain embodiments, PEP1 is selected from the group consisting of SAIS (SEQ ID NO: 13570), SSLS (SEQ ID NO: 13575), NAIS (SEQ ID NO: 13567), SATS (SEQ ID NO: 13571), SPIS (SEQ ID NO: 13574), EPIS (SEQ ID NO: 13563), SPIN (SEQ ID NO: 13573), KPLS (SEQ ID NO: 13566), EPLP (SEQ ID NO: 13564), EPLT (SEQ ID NO: 13565), SNIT (SEQ ID NO: 13572), RSVK (SEQ ID NO: 13569) and RPVQ (SEQ ID NO: 13568); PEP11 is selected from the group consisting of LYL, LFF, LYF, LYY, LYK, LYI, LFI, LYV, VYY, QIM, AKV and RKI; and the pair PEP1:PEP11 is selected from the group consisting of SAIS (SEQ ID NO: 13570):LYL, SSLS (SEQ ID NO: 13575):LFF, NAIS (SEQ ID NO: 13567):LYF, SATS (SEQ ID NO: 13571):LYY, SPIS (SEQ ID NO: 13574):LYK, SPIS (SEQ ID NO: 13574):LYI, SPIS (SEQ ID NO: 13574):LFI, EPIS (SEQ ID NO: 13563):LYL, SPIN (SEQ ID NO: 13573):LYF, KPLS (SEQ ID NO: 13566):LYV, EPLP (SEQ ID NO: 13564):VYY, EPLT (SEQ ID NO: 13565):LYY, SNIT (SEQ ID NO: 13572):QIM, RSVK (SEQ ID NO: 13569):AKV and RPVQ (SEQ ID NO: 13568):RKI.

[0374] In particular, in certain embodiments, the pair PEP3:PEP1 is selected from the group consisting of VPT:SAIS (SEQ ID NO: 13570), VPE:SAIS (SEQ ID NO: 13570), APT:SAIS (SEQ ID NO: 13570), TPT:SAIS (SEQ ID NO: 13570), VPA:SAIS (SEQ ID NO: 13570), APV:SAIS (SEQ ID NO: 13570), VPQ:SAIS (SEQ ID NO: 13570), VSQ:SAIS (SEQ ID NO: 13570), SRV:SAIS (SEQ ID NO: 13570), TQV:SAIS (SEQ ID NO: 13570), VPE:SSLS (SEQ ID NO: 13575), VPT:SSLS (SEQ ID NO: 13575), APT:SSLS (SEQ ID NO: 13575), TPT:SSLS (SEQ ID NO: 13575), VPA:SSLS (SEQ ID NO: 13575), APV:SSLS (SEQ ID NO: 13575), VPQ:SSLS (SEQ ID NO: 13575), VSQ:SSLS (SEQ ID NO: 13575), SRV:SSLS (SEQ ID NO: 13575), TQV:SSLS (SEQ ID NO: 13575), APT:NAIS (SEQ ID NO: 13567), VPT:NAIS (SEQ ID NO: 13567), VPE:NAIS (SEQ ID NO: 13567), TPT:NAIS (SEQ ID NO: 13567), VPA:NAIS (SEQ ID NO: 13567), APV:NAIS (SEQ ID NO: 13567), VPQ:NAIS (SEQ ID NO: 13567), VSQ:NAIS (SEQ ID NO: 13567), SRV:NAIS (SEQ ID NO: 13567), TQV:NAIS (SEQ ID NO: 13567), APT:SATS (SEQ ID NO: 13571), VPT:SATS (SEQ ID NO: 13571), VPE:SATS (SEQ ID NO: 13571), TPT:SATS (SEQ ID NO: 13571), VPA:SATS (SEQ ID NO: 13571), APV:SATS (SEQ ID NO: 13571), VPQ:SATS (SEQ ID NO: 13571), VSQ:SATS (SEQ ID NO: 13571), SRV:SATS (SEQ ID NO: 13571), TQV:SATS (SEQ ID NO: 13571), VPT:SPIS (SEQ ID NO: 13574), VPE:SPIS (SEQ ID NO: 13574), APT:SPIS (SEQ ID NO: 13574), TPT:SPIS (SEQ ID NO: 13574), VPA:SPIS (SEQ ID NO: 13574), APV:SPIS (SEQ ID NO: 13574), VPQ:SPIS (SEQ ID NO: 13574), VSQ:SPIS (SEQ ID NO: 13574), SRV:SPIS (SEQ ID NO: 13574), TQV:SPIS (SEQ ID NO: 13574), VPT:EPIS (SEQ ID NO: 13563), VPE:EPIS (SEQ ID NO: 13563), APT:EPIS (SEQ ID NO: 13563), TPT:EPIS (SEQ ID NO: 13563), VPA:EPIS (SEQ ID NO: 13563), APV:EPIS (SEQ ID NO: 13563), VPQ:EPIS (SEQ ID NO: 13563), VSQ:EPIS (SEQ ID NO: 13563), SRV:EPIS (SEQ ID NO: 13563), TQV:EPIS (SEQ ID NO: 13563), TPT:SPIN (SEQ ID NO: 13573), VPT:SPIN (SEQ ID NO: 13573), VPE:SPIN (SEQ ID NO: 13573), APT:SPIN (SEQ ID NO: 13573), VPA:SPIN (SEQ ID NO: 13573), APV:SPIN (SEQ ID NO: 13573), VPQ:SPIN (SEQ ID NO: 13573), VSQ:SPIN (SEQ ID NO: 13573), SRV:SPIN (SEQ ID NO: 13573), TQV:SPIN (SEQ ID NO: 13573), APV:KPLS (SEQ ID NO: 13566), VPT:KPLS (SEQ ID NO: 13566), VPE:KPLS (SEQ ID NO: 13566), APT:KPLS (SEQ ID NO: 13566), TPT:KPLS (SEQ ID NO: 13566), VPA:KPLS (SEQ ID NO: 13566), VPQ:KPLS (SEQ ID NO: 13566), VSQ:KPLS (SEQ ID NO: 13566), SRV:KPLS (SEQ ID NO: 13566), TQV:KPLS (SEQ ID NO: 13566), VPQ:EPLP (SEQ ID NO: 13564), VPT:EPLP (SEQ ID NO: 13564), VPE:EPLP (SEQ ID NO: 13564), APT:EPLP (SEQ ID NO: 13564), TPT:EPLP (SEQ ID NO: 13564), VPA:EPLP (SEQ ID NO: 13564), APV:EPLP (SEQ ID NO: 13564), VSQ:EPLP (SEQ ID NO: 13564), SRV:EPLP (SEQ ID NO: 13564), TQV:EPLP (SEQ ID NO: 13564), VSQ:EPLT (SEQ ID NO: 13565), VPT:EPLT (SEQ ID NO: 13565), VPE:EPLT (SEQ ID NO: 13565), APT:EPLT (SEQ ID NO: 13565), TPT:EPLT (SEQ ID NO: 13565), VPA:EPLT (SEQ ID NO: 13565), APV:EPLT (SEQ ID NO: 13565), VPQ:EPLT (SEQ ID NO: 13565), SRV:EPLT (SEQ ID NO: 13565), TQV:EPLT (SEQ ID NO: 13565), VPT:SNIT (SEQ ID NO: 13572), VPE:SNIT (SEQ ID NO: 13572), APT:SNIT (SEQ ID NO: 13572), TPT:SNIT (SEQ ID NO: 13572), VPA:SNIT (SEQ ID NO: 13572), APV:SNIT (SEQ ID NO: 13572), VPQ:SNIT (SEQ ID NO: 13572), VSQ:SNIT (SEQ ID NO: 13572), SRV:SNIT (SEQ ID NO: 13572), TQV:SNIT (SEQ ID NO: 13572), SRV:RSVK (SEQ ID NO: 13569), VPT:RSVK (SEQ ID NO: 13569), VPE:RSVK (SEQ ID NO: 13569), APT:RSVK (SEQ ID NO: 13569), TPT:RSVK (SEQ ID NO: 13569), VPA:RSVK (SEQ ID NO: 13569), APV:RSVK (SEQ ID NO: 13569), VPQ:RSVK (SEQ ID NO: 13569), VSQ:RSVK (SEQ ID NO: 13569), TQV:RSVK (SEQ ID NO: 13569), TQV:RPVQ (SEQ ID NO: 13568), VPT:RPVQ (SEQ ID NO: 13568), VPE:RPVQ (SEQ ID NO: 13568), APT:RPVQ (SEQ ID NO: 13568), TPT:RPVQ (SEQ ID NO: 13568), VPA:RPVQ (SEQ ID NO: 13568), APV:RPVQ (SEQ ID NO: 13568), VPQ:RPVQ (SEQ ID NO: 13568), VSQ:RPVQ (SEQ ID NO: 13568) and SRV:RPVQ (SEQ ID NO: 13568).

[0375] In particular, in certain embodiments, the pair PEP5:PEP1 is selected from the group consisting of VPTKM (SEQ ID NO: 13634):SAIS (SEQ ID NO: 13570), VPTKL (SEQ ID NO: 13633):SAIS (SEQ ID NO: 13570), VPTQL (SEQ ID NO: 13636):SAIS (SEQ ID NO: 13570), VPTRL (SEQ ID NO: 13637):SAIS (SEQ ID NO: 13570), VPTKT (SEQ ID NO: 13635):SAIS (SEQ ID NO: 13570), VPTAL (SEQ ID NO: 13628):SAIS (SEQ ID NO: 13570), VPTDL (SEQ ID NO: 13629):SAIS (SEQ ID NO: 13570), VPEKM (SEQ ID NO: 13616):SAIS (SEQ ID NO: 13570), APTKL (SEQ ID NO: 13579):SAIS (SEQ ID NO: 13570), APTQL (SEQ ID NO: 13582):SAIS (SEQ ID NO: 13570), TPTKM (SEQ ID NO: 13598):SAIS (SEQ ID NO: 13570), VPARL (SEQ ID NO: 13611):SAIS (SEQ ID NO: 13570), APVKT (SEQ ID NO: 13589):SAIS (SEQ ID NO: 13570), VPQAL (SEQ ID NO: 13620):SAIS (SEQ ID NO: 13570), VSQDL (SEQ ID NO: 13639):SAIS (SEQ ID NO: 13570), VPQDL (SEQ ID NO: 13621):SAIS (SEQ ID NO: 13570), SRVHH (SEQ ID NO: 13592):SAIS (SEQ ID NO: 13570), TQVQL (SEQ ID NO: 13603):SAIS (SEQ ID NO: 13570), VPEEL (SEQ ID NO: 13614):SSLS (SEQ ID NO: 13575), VPEKL (SEQ ID NO: 13615):SSLS (SEQ ID NO: 13575), VPEQL (SEQ ID NO: 13618):SSLS (SEQ ID NO: 13575), VPEKM (SEQ ID NO: 13616):SSLS (SEQ ID NO: 13575), VPERL (SEQ ID NO: 13619):SSLS (SEQ ID NO: 13575), VPEKT (SEQ ID NO: 13617):SSLS (SEQ ID NO: 13575), VPEAL (SEQ ID NO: 13612):SSLS (SEQ ID NO: 13575), VPEDL (SEQ ID NO: 13613):SSLS (SEQ ID NO: 13575), VPTEL (SEQ ID NO: 13631):SSLS (SEQ ID NO: 13575), APTKL (SEQ ID NO: 13579):SSLS (SEQ ID NO: 13575), APTQL (SEQ ID NO: 13582):SSLS (SEQ ID NO: 13575), VPTKL (SEQ ID NO: 13633):SSLS (SEQ ID NO: 13575), TPTKM (SEQ ID NO: 13598):SSLS (SEQ ID NO: 13575), VPARL (SEQ ID NO: 13611):SSLS (SEQ ID NO: 13575), VPTRLSSLS, APVKT (SEQ ID NO: 13589):SSLS (SEQ ID NO: 13575), VPQAL (SEQ ID NO: 13620):SSLS (SEQ ID NO: 13575), VSQDL (SEQ ID NO: 13639):SSLS (SEQ ID NO: 13575), VPQDL (SEQ ID NO: 13621):SSLS (SEQ ID NO: 13575), VPTEE (SEQ ID NO: 13630):SSLS (SEQ ID NO: 13575), VPTGQSSLS, SRVHH (SEQ ID NO: 13592):SSLS (SEQ ID NO: 13575), TQVQL (SEQ ID NO: 13603):SSLS (SEQ ID NO: 13575), APTEL (SEQ ID NO: 13578):NAIS (SEQ ID NO: 13567), APTKM (SEQ ID NO: 13580):NAIS (SEQ ID NO: 13567), APTKL (SEQ ID NO: 13579):NAIS (SEQ ID NO: 13567), APTRL (SEQ ID NO: 13583):NAIS (SEQ ID NO: 13567), APTKT (SEQ ID NO: 13581):NAIS (SEQ ID NO: 13567), APTAL (SEQ ID NO: 13576):NAIS (SEQ ID NO: 13567), APTDL (SEQ ID NO: 13577):NAIS (SEQ ID NO: 13567), VPTEL (SEQ ID NO: 13631):NAIS (SEQ ID NO: 13567), VPEKM (SEQ ID NO: 13616):NAIS (SEQ ID NO: 13567), VPTKL (SEQ ID NO: 13633):NAIS (SEQ ID NO: 13567), TPTKM (SEQ ID NO: 13598):NAIS (SEQ ID NO: 13567), VPARL (SEQ ID NO: 13611):NAIS (SEQ ID NO: 13567), VPTRL (SEQ ID NO: 13637):NAIS (SEQ ID NO: 13567), APVKT (SEQ ID NO: 13589):NAIS (SEQ ID NO: 13567), VPQAL (SEQ ID NO: 13620):NAIS (SEQ ID NO: 13567), VSQDL (SEQ ID NO: 13639):NAIS (SEQ ID NO: 13567), VPQDL (SEQ ID NO: 13621):NAIS (SEQ ID NO: 13567), VPTEE (SEQ ID NO: 13630):NAIS (SEQ ID NO: 13567), VPTGQ (SEQ ID NO: 13632):NAIS (SEQ ID NO: 13567), SRVHH (SEQ ID NO: 13592):NAIS (SEQ ID NO: 13567), TQVQL (SEQ ID NO: 13603):NAIS (SEQ ID NO: 13567), APTEL (SEQ ID NO: 13578):SATS (SEQ ID NO: 13571), APTKM (SEQ ID NO: 13580):SATS (SEQ ID NO: 13571), APTKL (SEQ ID NO: 13579):SATS (SEQ ID NO: 13571), APTQL (SEQ ID NO: 13582):SATS (SEQ ID NO: 13571), APTRL (SEQ ID NO: 13583):SATS (SEQ ID NO: 13571), APTKT (SEQ ID NO: 13581):SATS (SEQ ID NO: 13571), APTAL (SEQ ID NO: 13576):SATS (SEQ ID NO: 13571), APTDL (SEQ ID NO: 13577):SATS (SEQ ID NO: 13571), VPTEL (SEQ ID NO: 13631):SATS (SEQ ID NO: 13571), VPEKM (SEQ ID NO: 13616):SATS (SEQ ID NO: 13571), VPTKL (SEQ ID NO: 13633):SATS (SEQ ID NO: 13571), TPTKM (SEQ ID NO: 13598):SATS (SEQ ID NO: 13571), VPARL (SEQ ID NO: 13611):SATS (SEQ ID NO: 13571), VPTRL (SEQ ID NO: 13637):SATS (SEQ ID NO: 13571), APVKT (SEQ ID NO: 13589):SATS (SEQ ID NO: 13571), VPQAL (SEQ ID NO: 13620):SATS (SEQ ID NO: 13571), VSQDL (SEQ ID NO: 13639):SATS (SEQ ID NO: 13571), VPQDL (SEQ ID NO: 13621):SATS (SEQ ID NO: 13571), VPTEE (SEQ ID NO: 13630):SATS (SEQ ID NO: 13571), VPTGQ (SEQ ID NO: 13632):SATS (SEQ ID NO: 13571), SRVHH (SEQ ID NO: 13592):SATS (SEQ ID NO: 13571), TQVQL (SEQ ID NO: 13603):SATS (SEQ ID NO: 13571), VPTEL (SEQ ID NO: 13631):SPIS (SEQ ID NO: 13574), VPTKM (SEQ ID NO: 13634):SPIS (SEQ ID NO: 13574), VPTKL (SEQ ID NO: 13633):SPIS (SEQ ID NO: 13574), VPTQL (SEQ ID NO: 13636):SPIS (SEQ ID NO: 13574), VPTRL (SEQ ID NO: 13637):SPIS (SEQ ID NO: 13574), VPTKT (SEQ ID NO: 13635):SPIS (SEQ ID NO: 13574), VPTAL (SEQ ID NO: 13628):SPIS (SEQ ID NO: 13574), VPTDL (SEQ ID NO: 13629):SPIS (SEQ ID NO: 13574), VPEKM (SEQ ID NO: 13616):SPIS (SEQ ID NO: 13574), APTKL (SEQ ID NO: 13579):SPIS (SEQ ID NO: 13574), APTQL (SEQ ID NO: 13582):SPIS (SEQ ID NO: 13574), TPTKM (SEQ ID NO: 13598):SPIS (SEQ ID NO: 13574), VPARL (SEQ ID NO: 13611):SPIS (SEQ ID NO: 13574), APVKT (SEQ ID NO: 13589):SPIS (SEQ ID NO: 13574), VPQAL (SEQ ID NO: 13620):SPIS (SEQ ID NO: 13574), VSQDL (SEQ ID NO: 13639):SPIS (SEQ ID NO: 13574), VPQDL (SEQ ID NO: 13621):SPIS (SEQ ID NO: 13574), SRVHH (SEQ ID NO: 13592):SPIS (SEQ ID NO: 13574), TQVQL (SEQ ID NO: 13603):SPIS (SEQ ID NO: 13574), VPTEL (SEQ ID NO: 13631):EPIS (SEQ ID NO: 13563), VPTKM (SEQ ID NO: 13634):EPIS (SEQ ID NO: 13563), VPTKL (SEQ ID NO: 13633):EPIS (SEQ ID NO: 13563), VPTQL (SEQ ID NO: 13636):EPIS (SEQ ID NO: 13563), VPTRL (SEQ ID NO: 13637):EPIS (SEQ ID NO: 13563), VPTKT (SEQ ID NO: 13635):EPIS (SEQ ID NO: 13563), VPTAL (SEQ ID NO: 13628):EPIS (SEQ ID NO: 13563), VPTDL (SEQ ID NO: 13629):EPIS (SEQ ID NO: 13563), VPEKM (SEQ ID NO: 13616):EPIS (SEQ ID NO: 13563), APTKL (SEQ ID NO: 13579):EPIS (SEQ ID NO: 13563), APTQL (SEQ ID NO: 13582):EPIS (SEQ ID NO: 13563), TPTKM (SEQ ID NO: 13598):EPIS (SEQ ID NO: 13563), VPARL (SEQ ID NO: 13611):EPIS (SEQ ID NO: 13563), APVKT (SEQ ID NO: 13589):EPIS (SEQ ID NO: 13563), VPQAL (SEQ ID NO: 13620):EPIS (SEQ ID NO: 13563), VSQDL (SEQ ID NO: 13639):EPIS (SEQ ID NO: 13563), VPQDL (SEQ ID NO: 13621):EPIS (SEQ ID NO: 13563), SRVHH (SEQ ID NO: 13592):EPIS (SEQ ID NO: 13563), TQVQL (SEQ ID NO: 13603):EPIS (SEQ ID NO: 13563), TPTEL (SEQ ID NO: 13596):SPIN (SEQ ID NO: 13573), TPTKM (SEQ ID NO: 13598):SPIN (SEQ ID NO: 13573), TPTKL (SEQ ID NO: 13597):SPIN (SEQ ID NO: 13573), TPTQL (SEQ ID NO: 13600):SPIN (SEQ ID NO: 13573), TPTRL (SEQ ID NO: 13601):SPIN (SEQ ID NO: 13573), TPTKT (SEQ ID NO: 13599):SPIN (SEQ ID NO: 13573), TPTAL (SEQ ID NO: 13594):SPIN (SEQ ID NO: 13573), TPTDL (SEQ ID NO: 13595):SPIN (SEQ ID NO: 13573), VPTEL (SEQ ID NO: 13631):SPIN (SEQ ID NO: 13573), VPEKM (SEQ ID NO: 13616):SPIN (SEQ ID NO: 13573), APTKL (SEQ ID NO: 13579):SPIN (SEQ ID NO: 13573), APTQL (SEQ ID NO: 13582):SPIN (SEQ ID NO: 13573), VPTKL (SEQ ID NO: 13633):SPIN (SEQ ID NO: 13573), VPARL (SEQ ID NO: 13611):SPIN (SEQ ID NO: 13573), VPTRL (SEQ ID NO: 13637):SPIN (SEQ ID NO: 13573), APVKT (SEQ ID NO: 13589):SPIN (SEQ ID NO: 13573), VPQAL (SEQ ID NO: 13620):SPIN (SEQ ID NO: 13573), VSQDL (SEQ ID NO: 13639):SPIN (SEQ ID NO: 13573), VPQDL (SEQ ID NO: 13621):SPIN (SEQ ID NO: 13573), VPTEE (SEQ ID NO: 13630):SPIN (SEQ ID NO: 13573), VPTGQ (SEQ ID NO: 13632):SPIN (SEQ ID NO: 13573), SRVHH (SEQ ID NO: 13592):SPIN (SEQ ID NO: 13573), TQVQL (SEQ ID NO: 13603):SPIN (SEQ ID NO: 13573), VPAEL (SEQ ID NO: 13606):SPIS (SEQ ID NO: 13574), VPAKM (SEQ ID NO: 13608):SPIS (SEQ ID NO: 13574), VPAKL (SEQ ID NO: 13607):SPIS (SEQ ID NO: 13574), VPAQL (SEQ ID NO: 13610):SPIS (SEQ ID NO: 13574), VPAKT (SEQ ID NO: 13609):SPIS (SEQ ID NO: 13574), VPAAL (SEQ ID NO: 13604):SPIS (SEQ ID NO: 13574), VPADL (SEQ ID NO: 13605):SPIS (SEQ ID NO: 13574), VPTEE (SEQ ID NO: 13630):SPIS (SEQ ID NO: 13574), VPTGQ (SEQ ID NO: 13632):SPIS (SEQ ID NO: 13574), APVEL (SEQ ID NO: 13586):KPLS (SEQ ID NO: 13566), APVKM (SEQ ID NO: 13588):KPLS (SEQ ID NO: 13566), APVKL (SEQ ID NO: 13587):KPLS (SEQ ID NO: 13566), APVQL (SEQ ID NO: 13590):KPLS (SEQ ID NO: 13566), APVRL (SEQ ID NO: 13591):KPLS (SEQ ID NO: 13566), APVAL (SEQ ID NO: 13584):KPLS (SEQ ID NO: 13566), APVDL (SEQ ID NO: 13585):KPLS (SEQ ID NO: 13566), VPTEL (SEQ ID NO: 13631):KPLS (SEQ ID NO: 13566), VPEKM (SEQ ID NO: 13616):KPLS (SEQ ID NO: 13566), APTKL (SEQ ID NO: 13579):KPLS (SEQ ID NO: 13566), APTQL (SEQ ID NO: 13582):KPLS (SEQ ID NO: 13566), VPTKL (SEQ ID NO: 13633):KPLS (SEQ ID NO: 13566), TPTKM (SEQ ID NO: 13598):KPLS (SEQ ID NO: 13566), VPARL (SEQ ID NO: 13611):KPLS (SEQ ID NO: 13566), VPTRL (SEQ ID NO: 13637):KPLS (SEQ ID NO: 13566), VPQAL (SEQ ID NO: 13620):KPLS (SEQ ID NO: 13566), VSQDL (SEQ ID NO: 13639):KPLS (SEQ ID NO: 13566), VPQDL (SEQ ID NO: 13621):KPLS (SEQ ID NO: 13566), VPTEE (SEQ ID NO: 13630):KPLS (SEQ ID NO: 13566), VPTGQ (SEQ ID NO: 13632):KPLS (SEQ ID NO: 13566), SRVHH (SEQ ID NO: 13592):KPLS (SEQ ID NO: 13566), TQVQL (SEQ ID NO: 13603):KPLS (SEQ ID NO: 13566), VPQEL (SEQ ID NO: 13622):EPLP (SEQ ID NO: 13564), VPQKM (SEQ ID NO: 13624):EPLP (SEQ ID NO: 13564), VPQKL (SEQ ID NO: 13623):EPLP (SEQ ID NO: 13564), VPQQL (SEQ ID NO: 13626):EPLP (SEQ ID NO: 13564), VPQRL (SEQ ID NO: 13627):EPLP (SEQ ID NO: 13564), VPQKT (SEQ ID NO: 13625):EPLP (SEQ ID NO: 13564), VPQDL (SEQ ID NO: 13621):EPLP (SEQ ID NO: 13564), VPTEL (SEQ ID NO: 13631):EPLP (SEQ ID NO: 13564), VPEKM (SEQ ID NO: 13616):EPLP (SEQ ID NO: 13564), APTKL (SEQ ID NO: 13579):EPLP (SEQ ID NO: 13564), APTQL (SEQ ID NO: 13582):EPLP (SEQ ID NO: 13564), VPTKL (SEQ ID NO: 13633):EPLP (SEQ ID NO: 13564), TPTKM (SEQ ID NO: 13598):EPLP (SEQ ID NO: 13564), VPARL (SEQ ID NO: 13611):EPLP (SEQ ID NO: 13564), VPTRL (SEQ ID NO: 13637):EPLP (SEQ ID NO: 13564), APVKT (SEQ ID NO: 13589):EPLP (SEQ ID NO: 13564), VSQDL (SEQ ID NO: 13639):EPLP (SEQ ID NO: 13564), VPTEE (SEQ ID NO: 13630):EPLP (SEQ ID NO: 13564), VPTGQ (SEQ ID NO: 13632):EPLP (SEQ ID NO: 13564), SRVHH (SEQ ID NO: 13592):EPLP (SEQ ID NO: 13564), TQVQL (SEQ ID NO: 13603):EPLP (SEQ ID NO: 13564), VSQEL (SEQ ID NO: 13640):EPLT (SEQ ID NO: 13565), VSQKM (SEQ ID NO: 13642):EPLT (SEQ ID NO: 13565), VSQKL (SEQ ID NO: 13641):EPLT (SEQ ID NO: 13565), VSQQL (SEQ ID NO: 13644):EPLT (SEQ ID NO: 13565), VSQRL (SEQ ID NO: 13645):EPLT (SEQ ID NO: 13565), VSQKT (SEQ ID NO: 13643):EPLT (SEQ ID NO: 13565), VSQAL (SEQ ID NO: 13638):EPLT (SEQ ID NO: 13565), VSQDL (SEQ ID NO: 13639):EPLT (SEQ ID NO: 13565), VPTEL (SEQ ID NO: 13631):EPLT (SEQ ID NO: 13565), VPEKM (SEQ ID NO: 13616):EPLT (SEQ ID NO: 13565), APTKL (SEQ ID NO: 13579):EPLT (SEQ ID NO: 13565), APTQL (SEQ ID NO: 13582):EPLT (SEQ ID NO: 13565), VPTKL (SEQ ID NO: 13633):EPLT (SEQ ID NO: 13565), TPTKM (SEQ ID NO: 13598):EPLT (SEQ ID NO: 13565), VPARL (SEQ ID NO: 13611):EPLT (SEQ ID NO: 13565), VPTRL (SEQ ID NO: 13637):EPLT (SEQ ID NO: 13565), APVKT (SEQ ID NO: 13589):EPLT (SEQ ID NO: 13565), VPQAL (SEQ ID NO: 13620):EPLT (SEQ ID NO: 13565), VPTEE (SEQ ID NO: 13630):EPLT (SEQ ID NO: 13565), VPTGQ (SEQ ID NO: 13632):EPLT (SEQ ID NO: 13565), SRVHH (SEQ ID NO: 13592):EPLT (SEQ ID NO: 13565), TQVQL (SEQ ID NO: 13603):EPLT (SEQ ID NO: 13565), VPQEL (SEQ ID NO: 13622):EPLT (SEQ ID NO: 13565), VPQKM (SEQ ID NO: 13624):EPLT (SEQ ID NO: 13565), VPQKL (SEQ ID NO: 13623):EPLT (SEQ ID NO: 13565), VPQQL (SEQ ID NO: 13626):EPLT (SEQ ID NO: 13565), VPQRL (SEQ ID NO: 13627):EPLT (SEQ ID NO: 13565), VPQKT (SEQ ID NO: 13625):EPLT (SEQ ID NO: 13565), VPQDL (SEQ ID NO: 13621):EPLT (SEQ ID NO: 13565), VPTGQ (SEQ ID NO: 13632):SNIT (SEQ ID NO: 13572), VPEKM (SEQ ID NO: 13616):SNIT (SEQ ID NO: 13572), APTKL (SEQ ID NO: 13579):SNIT (SEQ ID NO: 13572), APTQL (SEQ ID NO: 13582):SNIT (SEQ ID NO: 13572), TPTKM (SEQ ID NO: 13598):SNIT (SEQ ID NO: 13572), VPARL (SEQ ID NO: 13611):SNIT (SEQ ID NO: 13572), APVKT (SEQ ID NO: 13589):SNIT (SEQ ID NO: 13572), VPQAL (SEQ ID NO: 13620):SNIT (SEQ ID NO: 13572), VSQDL (SEQ ID NO: 13639):SNIT (SEQ ID NO: 13572), VPQDL (SEQ ID NO: 13621):SNIT (SEQ ID NO: 13572), SRVHH (SEQ ID NO: 13592):SNIT (SEQ ID NO: 13572), TQVQL (SEQ ID NO: 13603):SNIT (SEQ ID NO: 13572), SRVQL (SEQ ID NO: 13593):RSVK (SEQ ID NO: 13569), VPTEL (SEQ ID NO: 13631):RSVK (SEQ ID NO: 13569), VPEKM (SEQ ID NO: 13616):RSVK (SEQ ID NO: 13569), APTKL (SEQ ID NO: 13579):RSVK (SEQ ID NO: 13569), APTQL (SEQ ID NO: 13582):RSVK (SEQ ID NO: 13569), VPTKL (SEQ ID NO: 13633):RSVK (SEQ ID NO: 13569), TPTKM (SEQ ID NO: 13598):RSVK (SEQ ID NO: 13569), VPARL (SEQ ID NO: 13611):RSVK (SEQ ID NO: 13569), VPTRL (SEQ ID NO: 13637):RSVK (SEQ ID NO: 13569), APVKT (SEQ ID NO: 13589):RSVK (SEQ ID NO: 13569), VPQAL (SEQ ID NO: 13620):RSVK (SEQ ID NO: 13569), VSQDL (SEQ ID NO: 13639):RSVK (SEQ ID NO: 13569), VPQDL (SEQ ID NO: 13621):RSVK (SEQ ID NO: 13569), VPTEE (SEQ ID NO: 13630):RSVK (SEQ ID NO: 13569), VPTGQ (SEQ ID NO: 13632):RSVK (SEQ ID NO: 13569), TQVQL (SEQ ID NO: 13603):RSVK (SEQ ID NO: 13569), TQVHH (SEQ ID NO: 13602):RPVQ (SEQ ID NO: 13568), VPTEL (SEQ ID NO: 13631):RPVQ (SEQ ID NO: 13568), VPEKM (SEQ ID NO: 13616):RPVQ (SEQ ID NO: 13568), APTKL (SEQ ID NO: 13579):RPVQ (SEQ ID NO: 13568), APTQL (SEQ ID NO: 13582):RPVQ (SEQ ID NO: 13568), VPTKL (SEQ ID NO: 13633):RPVQ (SEQ ID NO: 13568), TPTKM (SEQ ID NO: 13598):RPVQ (SEQ ID NO: 13568), VPARL (SEQ ID NO: 13611):RPVQ (SEQ ID NO: 13568), VPTRL (SEQ ID NO: 13637):RPVQ (SEQ ID NO: 13568), APVKT (SEQ ID NO: 13589):RPVQ (SEQ ID NO: 13568), VPQAL (SEQ ID NO: 13620):RPVQ (SEQ ID NO: 13568), VSQDL (SEQ ID NO: 13639):RPVQ (SEQ ID NO: 13568), VPQDL (SEQ ID NO: 13621):RPVQ (SEQ ID NO: 13568), VPTEE (SEQ ID NO: 13630):RPVQ (SEQ ID NO: 13568), VPTGQ (SEQ ID NO: 13632):RPVQ (SEQ ID NO: 13568) and SRVHH (SEQ ID NO: 13592):RPVQ (SEQ ID NO: 13568).

[0376] In particular, in certain embodiments, the pair PEP7:PEP1 is selected from the group consisting of GIPEPXX (SEQ ID NO: 13650):SAIS (SEQ ID NO: 13570), HVTKPTX (SEQ ID NO: 13653):SAIS (SEQ ID NO: 13570), YVPKPXX (SEQ ID NO: 13664):SAIS (SEQ ID NO: 13570), TVPKPXX (SEQ ID NO: 13663):SAIS (SEQ ID NO: 13570), AVPKAXX (SEQ ID NO: 13649):SAIS (SEQ ID NO: 13570), KVGKAXX (SEQ ID NO: 13656):SAIS (SEQ ID NO: 13570), KASKAXX (SEQ ID NO: 13654):SAIS (SEQ ID NO: 13570), GSAGPXX (SEQ ID NO: 13651):SAIS (SEQ ID NO: 13570), AAPASXX (SEQ ID NO: 13646):SAIS (SEQ ID NO: 13570), STPPTXX (SEQ ID NO: 13662):SAIS (SEQ ID NO: 13570), HVPKPXX (SEQ ID NO: 13652):SAIS (SEQ ID NO: 13570), RVPSTXX (SEQ ID NO: 13659):SAIS (SEQ ID NO: 13570), ASAAPXX (SEQ ID NO: 13647):SAIS (SEQ ID NO: 13570), ASASPXX (SEQ ID NO: 13648):SAIS (SEQ ID NO: 13570), SSVKXQP (SEQ ID NO: 13661):SAIS (SEQ ID NO: 13570), RNVQXRP (SEQ ID NO: 13658):SAIS (SEQ ID NO: 13570), KIPKAXX (SEQ ID NO: 13655):SSLS (SEQ ID NO: 13575), SIPKAXX (SEQ ID NO: 13660):SSLS (SEQ ID NO: 13575), HVTKPTX (SEQ ID NO: 13653):SSLS (SEQ ID NO: 13575), YVPKPXX (SEQ ID NO: 13664):SSLS (SEQ ID NO: 13575), TVPKPXX (SEQ ID NO: 13663):SSLS (SEQ ID NO: 13575), AVPKAXX (SEQ ID NO: 13649):SSLS (SEQ ID NO: 13575), KVGKAXX (SEQ ID NO: 13656):SSLS (SEQ ID NO: 13575), KASKAXX (SEQ ID NO: 13654):SSLS (SEQ ID NO: 13575), GSAGPXX (SEQ ID NO: 13651):SSLS (SEQ ID NO: 13575), AAPASXX (SEQ ID NO: 13646):SSLS (SEQ ID NO: 13575), STPPTXX (SEQ ID NO: 13662):SSLS (SEQ ID NO: 13575), HVPKPXX (SEQ ID NO: 13652):SSLS (SEQ ID NO: 13575), RVPSTXX (SEQ ID NO: 13659):SSLS (SEQ ID NO: 13575), ASAAPXX (SEQ ID NO: 13647):SSLS (SEQ ID NO: 13575), ASASPXX (SEQ ID NO: 13648):SSLS (SEQ ID NO: 13575), NDEGLEX (SEQ ID NO: 13657):SSLS (SEQ ID NO: 13575), SSVKXQP (SEQ ID NO: 13661):SSLS (SEQ ID NO: 13575), RNVQXRP (SEQ ID NO: 13658):SSLS (SEQ ID NO: 13575), KIPKAXX (SEQ ID NO: 13655):NAIS (SEQ ID NO: 13567), GIPEPXX (SEQ ID NO: 13650):NAIS (SEQ ID NO: 13567), SIPKAXX (SEQ ID NO: 13660):NAIS (SEQ ID NO: 13567), AVPKAXX (SEQ ID NO: 13649):NAIS (SEQ ID NO: 13567), KVGKAXX (SEQ ID NO: 13656):NAIS (SEQ ID NO: 13567), KASKAXX (SEQ ID NO: 13654):NAIS (SEQ ID NO: 13567), GSAGPXX (SEQ ID NO: 13651):NAIS (SEQ ID NO: 13567), AAPASXX (SEQ ID NO: 13646):NAIS (SEQ ID NO: 13567), STPPTXX (SEQ ID NO: 13662):NAIS (SEQ ID NO: 13567), RVPSTXX (SEQ ID NO: 13659):NAIS (SEQ ID NO: 13567), ASAAPXX (SEQ ID NO: 13647):NAIS (SEQ ID NO: 13567), ASASPXX (SEQ ID NO: 13648):NAIS (SEQ ID NO: 13567), NDEGLEX (SEQ ID NO: 13657):NAIS (SEQ ID NO: 13567), SSVKXQP (SEQ ID NO: 13661):NAIS (SEQ ID NO: 13567), RNVQXRP (SEQ ID NO: 13658):NAIS (SEQ ID NO: 13567), KIPKAXX (SEQ ID NO: 13655):SATS (SEQ ID NO: 13571), GIPEPXX (SEQ ID NO: 13650):SATS (SEQ ID NO: 13571), SIPKAXX (SEQ ID NO: 13660):SATS (SEQ ID NO: 13571), HVTKPTX (SEQ ID NO: 13653):SATS (SEQ ID NO: 13571), YVPKPXX (SEQ ID NO: 13664):SATS (SEQ ID NO: 13571), TVPKPXX (SEQ ID NO: 13663):SATS (SEQ ID NO: 13571), KVGKAXX (SEQ ID NO: 13656):SATS (SEQ ID NO: 13571), KASKAXX (SEQ ID NO: 13654):SATS (SEQ ID NO: 13571), GSAGPXX (SEQ ID NO: 13651):SATS (SEQ ID NO: 13571), AAPASXX (SEQ ID NO: 13646):SATS (SEQ ID NO: 13571), STPPTXX (SEQ ID NO: 13662):SATS (SEQ ID NO: 13571), HVPKPXX (SEQ ID NO: 13652):SATS (SEQ ID NO: 13571), RVPSTXX (SEQ ID NO: 13659):SATS (SEQ ID NO: 13571), ASAAPXX (SEQ ID NO: 13647):SATS (SEQ ID NO: 13571), ASASPXX (SEQ ID NO: 13648):SATS (SEQ ID NO: 13571), NDEGLEX (SEQ ID NO: 13657):SATS (SEQ ID NO: 13571), SSVKXQP (SEQ ID NO: 13661):SATS (SEQ ID NO: 13571), RNVQXRP (SEQ ID NO: 13658):SATS (SEQ ID NO: 13571), KIPKAXX (SEQ ID NO: 13655):SPIS (SEQ ID NO: 13574), GIPEPXX (SEQ ID NO: 13650):SPIS (SEQ ID NO: 13574), SIPKAXX (SEQ ID NO: 13660):SPIS (SEQ ID NO: 13574), HVTKPTX (SEQ ID NO: 13653):SPIS (SEQ ID NO: 13574), YVPKPXX (SEQ ID NO: 13664):SPIS (SEQ ID NO: 13574), TVPKPXX (SEQ ID NO: 13663):SPIS (SEQ ID NO: 13574), AVPKAXX (SEQ ID NO: 13649):SPIS (SEQ ID NO: 13574), KASKAXX (SEQ ID NO: 13654):SPIS (SEQ ID NO: 13574), GSAGPXX (SEQ ID NO: 13651):SPIS (SEQ ID NO: 13574), AAPASXX (SEQ ID NO: 13646):SPIS (SEQ ID NO: 13574), STPPTXX (SEQ ID NO: 13662):SPIS (SEQ ID NO: 13574), HVPKPXX (SEQ ID NO: 13652):SPIS (SEQ ID NO: 13574), RVPSTXX (SEQ ID NO: 13659):SPIS (SEQ ID NO: 13574), ASAAPXX (SEQ ID NO: 13647):SPIS (SEQ ID NO: 13574), ASASPXX (SEQ ID NO: 13648):SPIS (SEQ ID NO: 13574), SSVKXQP (SEQ ID NO: 13661):SPIS (SEQ ID NO: 13574), RNVQXRP (SEQ ID NO: 13658):SPIS (SEQ ID NO: 13574), KIPKAXX (SEQ ID NO: 13655):EPIS (SEQ ID NO: 13563), GIPEPXX (SEQ ID NO: 13650):EPIS (SEQ ID NO: 13563), SIPKAXX (SEQ ID NO: 13660):EPIS (SEQ ID NO: 13563), HVTKPTX (SEQ ID NO: 13653):EPIS (SEQ ID NO: 13563), YVPKPXX (SEQ ID NO: 13664):EPIS (SEQ ID NO: 13563), TVPKPXX (SEQ ID NO: 13663):EPIS (SEQ ID NO: 13563), AVPKAXX (SEQ ID NO: 13649):EPIS (SEQ ID NO: 13563), KVGKAXX (SEQ ID NO: 13656):EPIS (SEQ ID NO: 13563), GSAGPXX (SEQ ID NO: 13651):EPIS (SEQ ID NO: 13563), AAPASXX (SEQ ID NO: 13646):EPIS (SEQ ID NO: 13563), STPPTXX (SEQ ID NO: 13662):EPIS (SEQ ID NO: 13563), HVPKPXX (SEQ ID NO: 13652):EPIS (SEQ ID NO: 13563), RVPSTXX (SEQ ID NO: 13659):EPIS (SEQ ID NO: 13563), ASAAPXX (SEQ ID NO: 13647):EPIS (SEQ ID NO: 13563), ASASPXX (SEQ ID NO: 13648):EPIS (SEQ ID NO: 13563), SSVKXQP (SEQ ID NO: 13661):EPIS (SEQ ID NO: 13563), RNVQXRP (SEQ ID NO: 13658):EPIS (SEQ ID NO: 13563), KIPKAXX (SEQ ID NO: 13655):SPIN (SEQ ID NO: 13573), GIPEPXX (SEQ ID NO: 13650):SPIN (SEQ ID NO: 13573), SIPKAXX (SEQ ID NO: 13660):SPIN (SEQ ID NO: 13573), HVTKPTX (SEQ ID NO: 13653):SPIN (SEQ ID NO: 13573), YVPKPXX (SEQ ID NO: 13664):SPIN (SEQ ID NO: 13573), TVPKPXX (SEQ ID NO: 13663):SPIN (SEQ ID NO: 13573), AVPKAXX (SEQ ID NO: 13649):SPIN (SEQ ID NO: 13573), KVGKAXX (SEQ ID NO: 13656):SPIN (SEQ ID NO: 13573), KASKAXX (SEQ ID NO: 13654):SPIN (SEQ ID NO: 13573), AAPASXX (SEQ ID NO: 13646):SPIN (SEQ ID NO: 13573), STPPTXX (SEQ ID NO: 13662):SPIN (SEQ ID NO: 13573), HVPKPXX (SEQ ID NO: 13652):SPIN (SEQ ID NO: 13573), RVPSTXX (SEQ ID NO: 13659):SPIN (SEQ ID NO: 13573), ASAAPXX (SEQ ID NO: 13647):SPIN (SEQ ID NO: 13573), ASASPXX (SEQ ID NO: 13648):SPIN (SEQ ID NO: 13573), NDEGLEX (SEQ ID NO: 13657):SPIN (SEQ ID NO: 13573), SSVKXQP (SEQ ID NO: 13661):SPIN (SEQ ID NO: 13573), RNVQXRP (SEQ ID NO: 13658):SPIN (SEQ ID NO: 13573), KVGKAXX (SEQ ID NO: 13656):SPIS (SEQ ID NO: 13574), NDEGLEX (SEQ ID NO: 13657):SPIS (SEQ ID NO: 13574), KIPKAXX (SEQ ID NO: 13655):KPLS (SEQ ID NO: 13566), GIPEPXX (SEQ ID NO: 13650):KPLS (SEQ ID NO: 13566), SIPKAXX (SEQ ID NO: 13660):KPLS (SEQ ID NO: 13566), HVTKPTX (SEQ ID NO: 13653):KPLS (SEQ ID NO: 13566), YVPKPXX (SEQ ID NO: 13664):KPLS (SEQ ID NO: 13566), TVPKPXX (SEQ ID NO: 13663):KPLS (SEQ ID NO: 13566), AVPKAXX (SEQ ID NO: 13649):KPLS (SEQ ID NO: 13566), KVGKAXX (SEQ ID NO: 13656):KPLS (SEQ ID NO: 13566), KASKAXX (SEQ ID NO: 13654):KPLS (SEQ ID NO: 13566), GSAGPXX (SEQ ID NO: 13651):KPLS (SEQ ID NO: 13566), AAPASXX (SEQ ID NO: 13646):KPLS (SEQ ID NO: 13566), STPPTXX (SEQ ID NO: 13662):KPLS (SEQ ID NO: 13566), HVPKPXX (SEQ ID NO: 13652):KPLS (SEQ ID NO: 13566), ASAAPXX (SEQ ID NO: 13647):KPLS (SEQ ID NO: 13566), ASASPXX (SEQ ID NO: 13648):KPLS (SEQ ID NO: 13566), NDEGLEX (SEQ ID NO: 13657):KPLS (SEQ ID NO: 13566), SSVKXQP (SEQ ID NO: 13661):KPLS (SEQ ID NO: 13566), RNVQXRP (SEQ ID NO: 13658):KPLS (SEQ ID NO: 13566), KIPKAXX (SEQ ID NO: 13655):EPLP (SEQ ID NO: 13564), GIPEPXX (SEQ ID NO: 13650):EPLP (SEQ ID NO: 13564), SIPKAXX (SEQ ID NO: 13660):EPLP (SEQ ID NO: 13564), HVTKPTX (SEQ ID NO: 13653):EPLP (SEQ ID NO: 13564), YVPKPXX (SEQ ID NO: 13664):EPLP (SEQ ID NO: 13564), TVPKPXX (SEQ ID NO: 13663):EPLP (SEQ ID NO: 13564), AVPKAXX (SEQ ID NO: 13649):EPLP (SEQ ID NO: 13564), KVGKAXX (SEQ ID NO: 13656):EPLP (SEQ ID NO: 13564), KASKAXX (SEQ ID NO: 13654):EPLP (SEQ ID NO: 13564), GSAGPXX (SEQ ID NO: 13651):EPLP (SEQ ID NO: 13564), AAPASXX (SEQ ID NO: 13646):EPLP (SEQ ID NO: 13564), STPPTXX (SEQ ID NO: 13662):EPLP (SEQ ID NO: 13564), HVPKPXX (SEQ ID NO: 13652):EPLP (SEQ ID NO: 13564), RVPSTXX (SEQ ID NO: 13659):EPLP (SEQ ID NO: 13564), ASASPXX (SEQ ID NO: 13648):EPLP (SEQ ID NO: 13564), NDEGLEX (SEQ ID NO: 13657):EPLP (SEQ ID NO: 13564), SSVKXQP (SEQ ID NO: 13661):EPLP (SEQ ID NO: 13564), RNVQXRP (SEQ ID NO: 13658):EPLP (SEQ ID NO: 13564), KIPKAXX (SEQ ID NO: 13655):EPLT (SEQ ID NO: 13565), GIPEPXX (SEQ ID NO: 13650):EPLT (SEQ ID NO: 13565), SIPKAXX (SEQ ID NO: 13660):EPLT (SEQ ID NO: 13565), HVTKPTX (SEQ ID NO: 13653):EPLT (SEQ ID NO: 13565), YVPKPXX (SEQ ID NO: 13664):EPLT (SEQ ID NO: 13565), TVPKPXX (SEQ ID NO: 13663):EPLT (SEQ ID NO: 13565), AVPKAXX (SEQ ID NO: 13649):EPLT (SEQ ID NO: 13565), KVGKAXX (SEQ ID NO: 13656):EPLT (SEQ ID NO: 13565), KASKAXX (SEQ ID NO: 13654):EPLT (SEQ ID NO: 13565), GSAGPXX (SEQ ID NO: 13651):EPLT (SEQ ID NO: 13565), AAPASXX (SEQ ID NO: 13646):EPLT (SEQ ID NO: 13565), STPPTXX (SEQ ID NO: 13662):EPLT (SEQ ID NO: 13565), HVPKPXX (SEQ ID NO: 13652):EPLT (SEQ ID NO: 13565), RVPSTXX (SEQ ID NO: 13659):EPLT (SEQ ID NO: 13565), ASAAPXX (SEQ ID NO: 13647):EPLT (SEQ ID NO: 13565), ASASPXX (SEQ ID NO: 13648):EPLT (SEQ ID NO: 13565), NDEGLEX (SEQ ID NO: 13657):EPLT (SEQ ID NO: 13565), SSVKXQP (SEQ ID NO: 13661):EPLT (SEQ ID NO: 13565), RNVQXRP (SEQ ID NO: 13658):EPLT (SEQ ID NO: 13565), NDEGLEX (SEQ ID NO: 13657):SNIT (SEQ ID NO: 13572), GIPEPXX (SEQ ID NO: 13650):SNIT (SEQ ID NO: 13572), HVTKPTX (SEQ ID NO: 13653):SNIT (SEQ ID NO: 13572), YVPKPXX (SEQ ID NO: 13664):SNIT (SEQ ID NO: 13572), TVPKPXX (SEQ ID NO: 13663):SNIT (SEQ ID NO: 13572), AVPKAXX (SEQ ID NO: 13649):SNIT (SEQ ID NO: 13572), GSAGPXX (SEQ ID NO: 13651):SNIT (SEQ ID NO: 13572), AAPASXX (SEQ ID NO: 13646):SNIT (SEQ ID NO: 13572), HVPKPXX (SEQ ID NO: 13652):SNIT (SEQ ID NO: 13572), RVPSTXX (SEQ ID NO: 13659):SNIT (SEQ ID NO: 13572), ASAAPXX (SEQ ID NO: 13647):SNIT (SEQ ID NO: 13572), ASASPXX (SEQ ID NO: 13648):SNIT (SEQ ID NO: 13572), SSVKXQP (SEQ ID NO: 13661):SNIT (SEQ ID NO: 13572), RNVQXRP (SEQ ID NO: 13658):SNIT (SEQ ID NO: 13572), RNVQXRP (SEQ ID NO: 13658):RSVK (SEQ ID NO: 13569), KIPKAXX (SEQ ID NO: 13655):RSVK (SEQ ID NO: 13569), GIPEPXX (SEQ ID NO: 13650):RSVK (SEQ ID NO: 13569), SIPKAXX (SEQ ID NO: 13660):RSVK (SEQ ID NO: 13569), HVTKPTX (SEQ ID NO: 13653):RSVK (SEQ ID NO: 13569), YVPKPXX (SEQ ID NO: 13664):RSVK (SEQ ID NO: 13569), TVPKPXX (SEQ ID NO: 13663):RSVK (SEQ ID NO: 13569), AVPKAXX (SEQ ID NO: 13649):RSVK (SEQ ID NO: 13569), KVGKAXX (SEQ ID NO: 13656):RSVK (SEQ ID NO: 13569), KASKAXX (SEQ ID NO: 13654):RSVK (SEQ ID NO: 13569), GSAGPXX (SEQ ID NO: 13651):RSVK (SEQ ID NO: 13569), AAPASXX (SEQ ID NO: 13646):RSVK (SEQ ID NO: 13569), STPPTXX (SEQ ID NO: 13662):RSVK (SEQ ID NO: 13569), HVPKPXX (SEQ ID NO: 13652):RSVK (SEQ ID NO: 13569), RVPSTXX (SEQ ID NO: 13659):RSVK (SEQ ID NO: 13569), ASAAPXX (SEQ ID NO: 13647):RSVK (SEQ ID NO: 13569), ASASPXX (SEQ ID NO: 13648):RSVK (SEQ ID NO: 13569), NDEGLEX (SEQ ID NO: 13657):RSVK (SEQ ID NO: 13569), SSVKXQP (SEQ ID NO: 13661):RPVQ (SEQ ID NO: 13568), KIPKAXX (SEQ ID NO: 13655):RPVQ (SEQ ID NO: 13568), GIPEPXX (SEQ ID NO: 13650):RPVQ (SEQ ID NO: 13568), SIPKAXX (SEQ ID NO: 13660):RPVQ (SEQ ID NO: 13568), HVTKPTX (SEQ ID NO: 13653):RPVQ (SEQ ID NO: 13568), YVPKPXX (SEQ ID NO: 13664):RPVQ (SEQ ID NO: 13568), TVPKPXX (SEQ ID NO: 13663):RPVQ (SEQ ID NO: 13568), AVPKAXX (SEQ ID NO: 13649):RPVQ (SEQ ID NO: 13568), KVGKAXX (SEQ ID NO: 13656):RPVQ (SEQ ID NO: 13568), KASKAXX (SEQ ID NO: 13654):RPVQ (SEQ ID NO: 13568), GSAGPXX (SEQ ID NO: 13651):RPVQ (SEQ ID NO: 13568), AAPASXX (SEQ ID NO: 13646):RPVQ (SEQ ID NO: 13568), STPPTXX (SEQ ID NO: 13662):RPVQ (SEQ ID NO: 13568), HVPKPXX (SEQ ID NO: 13652):RPVQ (SEQ ID NO: 13568), RVPSTXX (SEQ ID NO: 13659):RPVQ (SEQ ID NO: 13568), ASAAPXX (SEQ ID NO: 13647):RPVQ (SEQ ID NO: 13568), ASASPXX (SEQ ID NO: 13648):RPVQ (SEQ ID NO: 13568) and NDEGLEX (SEQ ID NO: 13657):RPVQ (SEQ ID NO: 13568).

[0377] In particular, in certain embodiments, the pair PEP9:PEP1 is selected from the group consisting of GIPEPXXVPTKM (SEQ ID NO: 13703):SAIS (SEQ ID NO: 13570), HVTKPTXVPTKL (SEQ ID NO: 13729):SAIS (SEQ ID NO: 13570), YVPKPXXVPTKL (SEQ ID NO: 13799):SAIS (SEQ ID NO: 13570), TVPKPXXVPTQL (SEQ ID NO: 13791):SAIS (SEQ ID NO: 13570), AVPKAXXVPTKL (SEQ ID NO: 13695):SAIS (SEQ ID NO: 13570), KVGKAXXVPTKL (SEQ ID NO: 13753):SAIS (SEQ ID NO: 13570), KASKAXXVPTKL (SEQ ID NO: 13737):SAIS (SEQ ID NO: 13570), GSAGPXXVPTKM (SEQ ID NO: 13711):SAIS (SEQ ID NO: 13570), AAPASXXVPTRL (SEQ ID NO: 13671):SAIS (SEQ ID NO: 13570), STPPTXXVPTRL (SEQ ID NO: 13783):SAIS (SEQ ID NO: 13570), HVPKPXXVPTKL (SEQ ID NO: 13719):SAIS (SEQ ID NO: 13570), RVPSTXXVPTKT (SEQ ID NO: 13765):SAIS (SEQ ID NO: 13570), ASAAPXXVPTAL (SEQ ID NO: 13679):SAIS (SEQ ID NO: 13570), ASASPXXVPTDL (SEQ ID NO: 13687):SAIS (SEQ ID NO: 13570), GIPEPXXVPEKM (SEQ ID NO: 13701):SAIS (SEQ ID NO: 13570), HVTKPTXAPTKL (SEQ ID NO: 13721):SAIS (SEQ ID NO: 13570), YVPKPXXAPTKL (SEQ ID NO: 13793):SAIS (SEQ ID NO: 13570), TVPKPXXAPTQL (SEQ ID NO: 13785):SAIS (SEQ ID NO: 13570), AVPKAXXAPTKL (SEQ ID NO: 13689):SAIS (SEQ ID NO: 13570), GSAGPXXTPTKM (SEQ ID NO: 13707):SAIS (SEQ ID NO: 13570), AAPASXXVPARL (SEQ ID NO: 13668):SAIS (SEQ ID NO: 13570), HVPKPXXAPTKL (SEQ ID NO: 13713):SAIS (SEQ ID NO: 13570), RVPSTXXAPVKT (SEQ ID NO: 13760):SAIS (SEQ ID NO: 13570), ASAAPXXVPQAL (SEQ ID NO: 13678):SAIS (SEQ ID NO: 13570), ASASPXXVSQDL (SEQ ID NO: 13688):SAIS (SEQ ID NO: 13570), ASASPXXVPQDL (SEQ ID NO: 13686):SAIS (SEQ ID NO: 13570), SSVKXQPSRVHH (SEQ ID NO: 13775):SAIS (SEQ ID NO: 13570), RNVQXRPTQVQL (SEQ ID NO: 13758):SAIS (SEQ ID NO: 13570), KIPKAXXVPEEL (SEQ ID NO: 13743):SSLS (SEQ ID NO: 13575), SIPKAXXVPEEL (SEQ ID NO: 13771):SSLS (SEQ ID NO: 13575), HVTKPTXVPEKL (SEQ ID NO: 13727):SSLS (SEQ ID NO: 13575), YVPKPXXVPEKL (SEQ ID NO: 13797):SSLS (SEQ ID NO: 13575), TVPKPXXVPEQL (SEQ ID NO: 13789):SSLS (SEQ ID NO: 13575), AVPKAXXVPEKL (SEQ ID NO: 13693):SSLS (SEQ ID NO: 13575), KVGKAXXVPEKL (SEQ ID NO: 13751):SSLS (SEQ ID NO: 13575), KASKAXXVPEKL (SEQ ID NO: 13735):SSLS (SEQ ID NO: 13575), GSAGPXXVPEKM (SEQ ID NO: 13709):SSLS (SEQ ID NO: 13575), AAPASXXVPERL (SEQ ID NO: 13669):SSLS (SEQ ID NO: 13575), STPPTXXVPERL (SEQ ID NO: 13781):SSLS (SEQ ID NO: 13575), HVPKPXXVPEKL (SEQ ID NO: 13717):SSLS (SEQ ID NO: 13575), RVPSTXXVPEKT (SEQ ID NO: 13763):SSLS (SEQ ID NO: 13575), ASAAPXXVPEAL (SEQ ID NO: 13677):SSLS (SEQ ID NO: 13575), ASASPXXVPEDL (SEQ ID NO: 13685):SSLS (SEQ ID NO: 13575), KIPKAXXVPTEL (SEQ ID NO: 13745):SSLS (SEQ ID NO: 13575), SIPKAXXVPTEL (SEQ ID NO: 13773):SSLS (SEQ ID NO: 13575), HVTKPTXAPTKL (SEQ ID NO: 13721):SSLS (SEQ ID NO: 13575), YVPKPXXAPTKL (SEQ ID NO: 13793):SSLS (SEQ ID NO: 13575), TVPKPXXAPTQL (SEQ ID NO: 13785):SSLS (SEQ ID NO: 13575), AVPKAXXAPTKL (SEQ ID NO: 13689):SSLS (SEQ ID NO: 13575), KVGKAXXVPTKL (SEQ ID NO: 13753):SSLS (SEQ ID NO: 13575), KASKAXXVPTKL (SEQ ID NO: 13737):SSLS (SEQ ID NO: 13575), GSAGPXXTPTKM (SEQ ID NO: 13707):SSLS (SEQ ID NO: 13575), AAPASXXVPARL (SEQ ID NO: 13668):SSLS (SEQ ID NO: 13575), STPPTXXVPTRL (SEQ ID NO: 13783):SSLS (SEQ ID NO: 13575), HVPKPXXAPTKL (SEQ ID NO: 13713):SSLS (SEQ ID NO: 13575), RVPSTXXAPVKT (SEQ ID NO: 13760):SSLS (SEQ ID NO: 13575), ASAAPXXVPQAL (SEQ ID NO: 13678):SSLS (SEQ ID NO: 13575), ASASPXXVSQDL (SEQ ID NO: 13688):SSLS (SEQ ID NO: 13575), ASASPXXVPQDL (SEQ ID NO: 13686):SSLS (SEQ ID NO: 13575), NDEGLEXVPTEE (SEQ ID NO: 13755):SSLS (SEQ ID NO: 13575), NDEGLEXVPTGQ (SEQ ID NO: 13756):SSLS (SEQ ID NO: 13575), SSVKXQPSRVHH (SEQ ID NO: 13775):SSLS (SEQ ID NO: 13575), RNVQXRPTQVQL (SEQ ID NO: 13758):SSLS (SEQ ID NO: 13575), KIPKAXXAPTEL (SEQ ID NO: 13739):NAIS (SEQ ID NO: 13567), GIPEPXXAPTKM (SEQ ID NO: 13697):NAIS (SEQ ID NO: 13567), SIPKAXXAPTEL (SEQ ID NO: 13767):NAIS (SEQ ID NO: 13567), AVPKAXXAPTKL (SEQ ID NO: 13689):NAIS (SEQ ID NO: 13567), KVGKAXXAPTKL (SEQ ID NO: 13747):NAIS (SEQ ID NO: 13567), KASKAXXAPTKL (SEQ ID NO: 13731):NAIS (SEQ ID NO: 13567), GSAGPXXAPTKM (SEQ ID NO: 13705):NAIS (SEQ ID NO: 13567), AAPASXXAPTRL (SEQ ID NO: 13665):NAIS (SEQ ID NO: 13567), STPPTXXAPTRL (SEQ ID NO: 13777):NAIS (SEQ ID NO: 13567), RVPSTXXAPTKT (SEQ ID NO: 13759):NAIS (SEQ ID NO: 13567), ASAAPXXAPTAL (SEQ ID NO: 13673):NAIS (SEQ ID NO: 13567), ASASPXXAPTDL (SEQ ID NO: 13681):NAIS (SEQ ID NO: 13567), KIPKAXXVPTEL (SEQ ID NO: 13745):NAIS (SEQ ID NO: 13567), GIPEPXXVPEKM (SEQ ID NO: 13701):NAIS (SEQ ID NO: 13567), SIPKAXXVPTEL (SEQ ID NO: 13773):NAIS (SEQ ID NO: 13567), KVGKAXXVPTKL (SEQ ID NO: 13753):NAIS (SEQ ID NO: 13567), KASKAXXVPTKL (SEQ ID NO: 13737):NAIS (SEQ ID NO: 13567), GSAGPXXTPTKM (SEQ ID NO: 13707):NAIS (SEQ ID NO: 13567), AAPASXXVPARL (SEQ ID NO: 13668):NAIS (SEQ ID NO: 13567), STPPTXXVPTRL (SEQ ID NO: 13783):NAIS (SEQ ID NO: 13567), RVPSTXXAPVKT (SEQ ID NO: 13760):NAIS (SEQ ID NO: 13567), ASAAPXXVPQAL (SEQ ID NO: 13678):NAIS (SEQ ID NO: 13567), ASASPXXVSQDL (SEQ ID NO: 13688):NAIS (SEQ ID NO: 13567), ASASPXXVPQDL (SEQ ID NO: 13686):NAIS (SEQ ID NO: 13567), NDEGLEXVPTEE (SEQ ID NO: 13755):NAIS (SEQ ID NO: 13567), NDEGLEXVPTGQ (SEQ ID NO: 13756):NAIS (SEQ ID NO: 13567), SSVKXQPSRVHH (SEQ ID NO: 13775):NAIS (SEQ ID NO: 13567), RNVQXRPTQVQL (SEQ ID NO: 13758):NAIS (SEQ ID NO: 13567), KIPKAXXAPTEL (SEQ ID NO: 13739):SATS (SEQ ID NO: 13571), GIPEPXXAPTKM (SEQ ID NO: 13697):SATS (SEQ ID NO: 13571), SIPKAXXAPTEL (SEQ ID NO: 13767):SATS (SEQ ID NO: 13571), HVTKPTXAPTKL (SEQ ID NO: 13721):SATS (SEQ ID NO: 13571), YVPKPXXAPTKL (SEQ ID NO: 13793):SATS (SEQ ID NO: 13571), TVPKPXXAPTQL (SEQ ID NO: 13785):SATS (SEQ ID NO: 13571), KVGKAXXAPTKL (SEQ ID NO: 13747):SATS (SEQ ID NO: 13571), KASKAXXAPTKL (SEQ ID NO: 13731):SATS (SEQ ID NO: 13571), GSAGPXXAPTKM (SEQ ID NO: 13705):SATS (SEQ ID NO: 13571), AAPASXXAPTRL (SEQ ID NO: 13665):SATS (SEQ ID NO: 13571), STPPTXXAPTRL (SEQ ID NO: 13777):SATS (SEQ ID NO: 13571), HVPKPXXAPTKL (SEQ ID NO: 13713):SATS (SEQ ID NO: 13571), RVPSTXXAPTKT (SEQ ID NO: 13759):SATS (SEQ ID NO: 13571), ASAAPXXAPTAL (SEQ ID NO: 13673):SATS (SEQ ID NO: 13571), ASASPXXAPTDL (SEQ ID NO: 13681):SATS (SEQ ID NO: 13571), KIPKAXXVPTEL (SEQ ID NO: 13745):SATS (SEQ ID NO: 13571), GIPEPXXVPEKM (SEQ ID NO: 13701):SATS (SEQ ID NO: 13571), SIPKAXXVPTEL (SEQ ID NO: 13773):SATS (SEQ ID NO: 13571), KVGKAXXVPTKL (SEQ ID NO: 13753):SATS (SEQ ID NO: 13571), KASKAXXVPTKL (SEQ ID NO: 13737):SATS (SEQ ID NO: 13571), GSAGPXXTPTKM (SEQ ID NO: 13707):SATS (SEQ ID NO: 13571), AAPASXXVPARL (SEQ ID NO: 13668):SATS (SEQ ID NO: 13571), STPPTXXVPTRL (SEQ ID NO: 13783):SATS (SEQ ID NO: 13571), RVPSTXXAPVKT (SEQ ID NO: 13760):SATS (SEQ ID NO: 13571), ASAAPXXVPQAL (SEQ ID NO: 13678):SATS (SEQ ID NO: 13571), ASASPXXVSQDL (SEQ ID NO: 13688):SATS (SEQ ID NO: 13571), ASASPXXVPQDL (SEQ ID NO: 13686):SATS (SEQ ID NO: 13571), NDEGLEXVPTEE (SEQ ID NO: 13755):SATS (SEQ ID NO: 13571), NDEGLEXVPTGQ (SEQ ID NO: 13756):SATS (SEQ ID NO: 13571), SSVKXQPSRVHH (SEQ ID NO: 13775):SATS (SEQ ID NO: 13571), RNVQXRPTQVQL (SEQ ID NO: 13758):SATS (SEQ ID NO: 13571), KIPKAXXVPTEL (SEQ ID NO: 13745):SPIS (SEQ ID NO: 13574), GIPEPXXVPTKM (SEQ ID NO: 13703):SPIS (SEQ ID NO: 13574), SIPKAXXVPTEL (SEQ ID NO: 13773):SPIS (SEQ ID NO: 13574), HVTKPTXVPTKL (SEQ ID NO: 13729):SPIS (SEQ ID NO: 13574), YVPKPXXVPTKL (SEQ ID NO: 13799):SPIS (SEQ ID NO: 13574), TVPKPXXVPTQL (SEQ ID NO: 13791):SPIS (SEQ ID NO: 13574), AVPKAXXVPTKL (SEQ ID NO: 13695):SPIS (SEQ ID NO: 13574), KASKAXXVPTKL (SEQ ID NO: 13737):SPIS (SEQ ID NO: 13574), GSAGPXXVPTKM (SEQ ID NO: 13711):SPIS (SEQ ID NO: 13574), AAPASXXVPTRL (SEQ ID NO: 13671):SPIS (SEQ ID NO: 13574), STPPTXXVPTRL (SEQ ID NO: 13783):SPIS (SEQ ID NO: 13574), HVPKPXXVPTKL (SEQ ID NO: 13719):SPIS (SEQ ID NO: 13574), RVPSTXXVPTKT (SEQ ID NO: 13765):SPIS (SEQ ID NO: 13574), ASAAPXXVPTAL (SEQ ID NO: 13679):SPIS (SEQ ID NO: 13574), ASASPXXVPTDL (SEQ ID NO: 13687):SPIS (SEQ ID NO: 13574), GIPEPXXVPEKM (SEQ ID NO: 13701):SPIS (SEQ ID NO: 13574), HVTKPTXAPTKL (SEQ ID NO: 13721):SPIS (SEQ ID NO: 13574), YVPKPXXAPTKL (SEQ ID NO: 13793):SPIS (SEQ ID NO: 13574), TVPKPXXAPTQL (SEQ ID NO: 13785):SPIS (SEQ ID NO: 13574), AVPKAXXAPTKL (SEQ ID NO: 13689):SPIS (SEQ ID NO: 13574), GSAGPXXTPTKM (SEQ ID NO: 13707):SPIS (SEQ ID NO: 13574), AAPASXXVPARL (SEQ ID NO: 13668):SPIS (SEQ ID NO: 13574), HVPKPXXAPTKL (SEQ ID NO: 13713):SPIS (SEQ ID NO: 13574), RVPSTXXAPVKT (SEQ ID NO: 13760):SPIS (SEQ ID NO: 13574), ASAAPXXVPQAL (SEQ ID NO: 13678):SPIS (SEQ ID NO: 13574), ASASPXXVSQDL (SEQ ID NO: 13688):SPIS (SEQ ID NO: 13574), ASASPXXVPQDL (SEQ ID NO: 13686):SPIS (SEQ ID NO: 13574), SSVKXQPSRVHH (SEQ ID NO: 13775):SPIS (SEQ ID NO: 13574), RNVQXRPTQVQL (SEQ ID NO: 13758):SPIS (SEQ ID NO: 13574), KIPKAXXVPTEL (SEQ ID NO: 13745):EPIS (SEQ ID NO: 13563), GIPEPXXVPTKM (SEQ ID NO: 13703):EPIS (SEQ ID NO: 13563), SIPKAXXVPTEL (SEQ ID NO: 13773):EPIS (SEQ ID NO: 13563), HVTKPTXVPTKL (SEQ ID NO: 13729):EPIS (SEQ ID NO: 13563), YVPKPXXVPTKL (SEQ ID NO: 13799):EPIS (SEQ ID NO: 13563), TVPKPXXVPTQL (SEQ ID NO: 13791):EPIS (SEQ ID NO: 13563), AVPKAXXVPTKL (SEQ ID NO: 13695):EPIS (SEQ ID NO: 13563), KVGKAXXVPTKL (SEQ ID NO: 13753):EPIS (SEQ ID NO: 13563), GSAGPXXVPTKM (SEQ ID NO: 13711):EPIS (SEQ ID NO: 13563), AAPASXXVPTRL (SEQ ID NO: 13671):EPIS (SEQ ID NO: 13563), STPPTXXVPTRL (SEQ ID NO: 13783):EPIS (SEQ ID NO: 13563), HVPKPXXVPTKL (SEQ ID NO: 13719):EPIS (SEQ ID NO: 13563), RVPSTXXVPTKT (SEQ ID NO: 13765):EPIS (SEQ ID NO: 13563), ASAAPXXVPTAL (SEQ ID NO: 13679):EPIS (SEQ ID NO: 13563), ASASPXXVPTDL (SEQ ID NO: 13687):EPIS (SEQ ID NO: 13563), GIPEPXXVPEKM (SEQ ID NO: 13701):EPIS (SEQ ID NO: 13563), HVTKPTXAPTKL (SEQ ID NO: 13721):EPIS (SEQ ID NO: 13563), YVPKPXXAPTKL (SEQ ID NO: 13793):EPIS (SEQ ID NO: 13563), TVPKPXXAPTQL (SEQ ID NO: 13785):EPIS (SEQ ID NO: 13563), AVPKAXXAPTKL (SEQ ID NO: 13689):EPIS (SEQ ID NO: 13563), GSAGPXXTPTKM (SEQ ID NO: 13707):EPIS (SEQ ID NO: 13563), AAPASXXVPARL (SEQ ID NO: 13668):EPIS (SEQ ID NO: 13563), HVPKPXXAPTKL (SEQ ID NO: 13713):EPIS (SEQ ID NO: 13563), RVPSTXXAPVKT (SEQ ID NO: 13760):EPIS (SEQ ID NO: 13563), ASAAPXXVPQAL (SEQ ID NO: 13678):EPIS (SEQ ID NO: 13563), ASASPXXVSQDL (SEQ ID NO: 13688):EPIS (SEQ ID NO: 13563), ASASPXXVPQDL (SEQ ID NO: 13686):EPIS (SEQ ID NO: 13563), SSVKXQPSRVHH (SEQ ID NO: 13775):EPIS (SEQ ID NO: 13563), RNVQXRPTQVQL (SEQ ID NO: 13758):EPIS (SEQ ID NO: 13563), KIPKAXXTPTEL (SEQ ID NO: 13741):SPIN (SEQ ID NO: 13573), GIPEPXXTPTKM (SEQ ID NO: 13699):SPIN (SEQ ID NO: 13573), SIPKAXXTPTEL (SEQ ID NO: 13769):SPIN (SEQ ID NO: 13573), HVTKPTXTPTKL (SEQ ID NO: 13724):SPIN (SEQ ID NO: 13573), YVPKPXXTPTKL (SEQ ID NO: 13795):SPIN (SEQ ID NO: 13573), TVPKPXXTPTQL (SEQ ID NO: 13787):SPIN (SEQ ID NO: 13573), AVPKAXXTPTKL (SEQ ID NO: 13691):SPIN (SEQ ID NO: 13573), KVGKAXXTPTKL (SEQ ID NO: 13749):SPIN (SEQ ID NO: 13573), KASKAXXTPTKL (SEQ ID NO: 13733):SPIN (SEQ ID NO: 13573), AAPASXXTPTRL (SEQ ID NO: 13667):SPIN (SEQ ID NO: 13573), STPPTXXTPTRL (SEQ ID NO: 13779):SPIN (SEQ ID NO: 13573), HVPKPXXTPTKL (SEQ ID NO: 13715):SPIN (SEQ ID NO: 13573), RVPSTXXTPTKT (SEQ ID NO: 13761):SPIN (SEQ ID NO: 13573), ASAAPXXTPTAL (SEQ ID NO: 13675):SPIN (SEQ ID NO: 13573), ASASPXXTPTDL (SEQ ID NO: 13683):SPIN (SEQ ID NO: 13573), KIPKAXXVPTEL (SEQ ID NO: 13745):SPIN (SEQ ID NO: 13573), GIPEPXXVPEKM (SEQ ID NO: 13701):SPIN (SEQ ID NO: 13573), SIPKAXXVPTEL (SEQ ID NO: 13773):SPIN (SEQ ID NO: 13573), HVTKPTXAPTKL (SEQ ID NO: 13721):SPIN (SEQ ID NO: 13573), YVPKPXXAPTKL (SEQ ID NO: 13793):SPIN (SEQ ID NO: 13573), TVPKPXXAPTQL (SEQ ID NO: 13785):SPIN (SEQ ID NO: 13573), AVPKAXXAPTKL (SEQ ID NO: 13689):SPIN (SEQ ID NO: 13573), KVGKAXXVPTKL (SEQ ID NO: 13753):SPIN (SEQ ID NO: 13573), KASKAXXVPTKL (SEQ ID NO: 13737):SPIN (SEQ ID NO: 13573), AAPASXXVPARL (SEQ ID NO: 13668):SPIN (SEQ ID NO: 13573), STPPTXXVPTRL (SEQ ID NO: 13783):SPIN (SEQ ID NO: 13573), HVPKPXXAPTKL (SEQ ID NO: 13713):SPIN (SEQ ID NO: 13573), RVPSTXXAPVKT (SEQ ID NO: 13760):SPIN (SEQ ID NO: 13573), ASAAPXXVPQAL (SEQ ID NO: 13678):SPIN (SEQ ID NO: 13573), ASASPXXVSQDL (SEQ ID NO: 13688):SPIN (SEQ ID NO: 13573), ASASPXXVPQDL (SEQ ID NO: 13686):SPIN (SEQ ID NO: 13573), NDEGLEXVPTEE (SEQ ID NO: 13755):SPIN (SEQ ID NO: 13573), NDEGLEXVPTGQ (SEQ ID NO: 13756):SPIN (SEQ ID NO: 13573), SSVKXQPSRVHH (SEQ ID NO: 13775):SPIN (SEQ ID NO: 13573), RNVQXRPTQVQL (SEQ ID NO: 13758):SPIN (SEQ ID NO: 13573), KIPKAXXVPAEL (SEQ ID NO: 13742):SPIS (SEQ ID NO: 13574), GIPEPXXVPAKM (SEQ ID NO: 13700):SPIS (SEQ ID NO: 13574), SIPKAXXVPAEL (SEQ ID NO: 13770):SPIS (SEQ ID NO: 13574), HVTKPTXVPAKL (SEQ ID NO: 13726):SPIS (SEQ ID NO: 13574), YVPKPXXVPAKL (SEQ ID NO: 13796):SPIS (SEQ ID NO: 13574), TVPKPXXVPAQL (SEQ ID NO: 13788):SPIS (SEQ ID NO: 13574), AVPKAXXVPAKL (SEQ ID NO: 13692):SPIS (SEQ ID NO: 13574), KVGKAXXVPAKL (SEQ ID NO: 13750):SPIS (SEQ ID NO: 13574), KASKAXXVPAKL (SEQ ID NO: 13734):SPIS (SEQ ID NO: 13574), GSAGPXXVPAKM (SEQ ID NO: 13708):SPIS (SEQ ID NO: 13574), STPPTXXVPARL (SEQ ID NO: 13780):SPIS (SEQ ID NO: 13574), HVPKPXXVPAKL (SEQ ID NO: 13716):SPIS (SEQ ID NO: 13574), RVPSTXXVPAKT (SEQ ID NO: 13762):SPIS (SEQ ID NO: 13574), ASAAPXXVPAAL (SEQ ID NO: 13676):SPIS (SEQ ID NO: 13574), ASASPXXVPADL (SEQ ID NO: 13684):SPIS (SEQ ID NO: 13574), KVGKAXXVPTKL (SEQ ID NO: 13753):SPIS (SEQ ID NO: 13574), NDEGLEXVPTEE (SEQ ID NO: 13755):SPIS (SEQ ID NO: 13574), NDEGLEXVPTGQ (SEQ ID NO: 13756):SPIS (SEQ ID NO: 13574), KIPKAXXAPVEL (SEQ ID NO: 13740):KPLS (SEQ ID NO: 13566), GIPEPXXAPVKM (SEQ ID NO: 13698):KPLS (SEQ ID NO: 13566), SIPKAXXAPVEL (SEQ ID NO: 13768):KPLS (SEQ ID NO: 13566), HVTKPTXAPVKL (SEQ ID NO: 13722):KPLS (SEQ ID NO: 13566), YVPKPXXAPVKL (SEQ ID NO: 13794):KPLS (SEQ ID NO: 13566), TVPKPXXAPVQL (SEQ ID NO: 13786):KPLS (SEQ ID NO: 13566), AVPKAXXAPVKL (SEQ ID NO: 13690):KPLS (SEQ ID NO: 13566), KVGKAXXAPVKL (SEQ ID NO: 13748):KPLS (SEQ ID NO: 13566), KASKAXXAPVKL (SEQ ID NO: 13732):KPLS (SEQ ID NO: 13566), GSAGPXXAPVKM (SEQ ID NO: 13706):KPLS (SEQ ID NO: 13566), AAPASXXAPVRL (SEQ ID NO: 13666):KPLS (SEQ ID NO: 13566), STPPTXXAPVRL (SEQ ID NO: 13778):KPLS (SEQ ID NO: 13566), HVPKPXXAPVKL (SEQ ID NO: 13714):KPLS (SEQ ID NO: 13566), ASAAPXXAPVAL (SEQ ID NO: 13674):KPLS (SEQ ID NO: 13566), ASASPXXAPVDL (SEQ ID NO: 13682):KPLS (SEQ ID NO: 13566), KIPKAXXVPTEL (SEQ ID NO: 13745):KPLS (SEQ ID NO: 13566), GIPEPXXVPEKM (SEQ ID NO: 13701):KPLS (SEQ ID NO: 13566), SIPKAXXVPTEL (SEQ ID NO: 13773):KPLS (SEQ ID NO: 13566), HVTKPTXAPTKL (SEQ ID NO: 13721):KPLS (SEQ ID NO: 13566), YVPKPXXAPTKL (SEQ ID NO: 13793):KPLS (SEQ ID NO: 13566), TVPKPXXAPTQL (SEQ ID NO: 13785):KPLS (SEQ ID NO: 13566), AVPKAXXAPTKL (SEQ ID NO: 13689):KPLS (SEQ ID NO: 13566), KVGKAXXVPTKL (SEQ ID NO: 13753):KPLS (SEQ ID NO: 13566), KASKAXXVPTKL (SEQ ID NO: 13737):KPLS (SEQ ID NO: 13566), GSAGPXXTPTKM (SEQ ID NO: 13707):KPLS (SEQ ID NO: 13566), AAPASXXVPARL (SEQ ID NO: 13668):KPLS (SEQ ID NO: 13566), STPPTXXVPTRL (SEQ ID NO: 13783):KPLS (SEQ ID NO: 13566), HVPKPXXAPTKL (SEQ ID NO: 13713):KPLS (SEQ ID NO: 13566), ASAAPXXVPQAL (SEQ ID NO: 13678):KPLS (SEQ ID NO: 13566), ASASPXXVSQDL (SEQ ID NO: 13688):KPLS (SEQ ID NO: 13566), ASASPXXVPQDL (SEQ ID NO: 13686):KPLS (SEQ ID NO: 13566), NDEGLEXVPTEE (SEQ ID NO: 13755):KPLS (SEQ ID NO: 13566), NDEGLEXVPTGQ (SEQ ID NO: 13756):KPLS (SEQ ID NO: 13566), SSVKXQPSRVHH (SEQ ID NO: 13775):KPLS (SEQ ID NO: 13566), RNVQXRPTQVQL (SEQ ID NO: 13758):KPLS (SEQ ID NO: 13566), KIPKAXXVPQEL (SEQ ID NO: 13744):EPLP (SEQ ID NO: 13564), GIPEPXXVPQKM (SEQ ID NO: 13702):EPLP (SEQ ID NO: 13564), SIPKAXXVPQEL (SEQ ID NO: 13772):EPLP (SEQ ID NO: 13564), HVTKPTXVPQKL (SEQ ID NO: 13728):EPLP (SEQ ID NO: 13564), YVPKPXXVPQKL (SEQ ID NO: 13798):EPLP (SEQ ID NO: 13564), TVPKPXXVPQQL (SEQ ID NO: 13790):EPLP (SEQ ID NO: 13564), AVPKAXXVPQKL (SEQ ID NO: 13694):EPLP (SEQ ID NO: 13564), KVGKAXXVPQKL (SEQ ID NO: 13752):EPLP (SEQ ID NO: 13564), KASKAXXVPQKL (SEQ ID NO: 13736):EPLP (SEQ ID NO: 13564), GSAGPXXVPQKM (SEQ ID NO: 13710):EPLP (SEQ ID NO: 13564), AAPASXXVPQRL (SEQ ID NO: 13670):EPLP (SEQ ID NO: 13564), STPPTXXVPQRL (SEQ ID NO: 13782):EPLP (SEQ ID NO: 13564), HVPKPXXVPQKL (SEQ ID NO: 13718):EPLP (SEQ ID NO: 13564), RVPSTXXVPQKT (SEQ ID NO: 13764):EPLP (SEQ ID NO: 13564), ASASPXXVPQDL (SEQ ID NO: 13686):EPLP (SEQ ID NO: 13564), KIPKAXXVPTEL (SEQ ID NO: 13745):EPLP (SEQ ID NO: 13564), GIPEPXXVPEKM (SEQ ID NO: 13701):EPLP (SEQ ID NO: 13564), SIPKAXXVPTEL (SEQ ID NO: 13773):EPLP (SEQ ID NO: 13564), HVTKPTXAPTKL (SEQ ID NO: 13721):EPLP (SEQ ID NO: 13564), YVPKPXXAPTKL (SEQ ID NO: 13793):EPLP (SEQ ID NO: 13564), TVPKPXXAPTQL (SEQ ID NO: 13785):EPLP (SEQ ID NO: 13564), AVPKAXXAPTKL (SEQ ID NO: 13689):EPLP (SEQ ID NO: 13564), KVGKAXXVPTKL (SEQ ID NO: 13753):EPLP (SEQ ID NO: 13564), KASKAXXVPTKL (SEQ ID NO: 13737):EPLP (SEQ ID NO: 13564), GSAGPXXTPTKM (SEQ ID NO: 13707):EPLP (SEQ ID NO: 13564), AAPASXXVPARL (SEQ ID NO: 13668):EPLP (SEQ ID NO: 13564), STPPTXXVPTRL (SEQ ID NO: 13783):EPLP (SEQ ID NO: 13564), HVPKPXXAPTKL (SEQ ID NO: 13713):EPLP (SEQ ID NO: 13564), RVPSTXXAPVKT (SEQ ID NO: 13760):EPLP (SEQ ID NO: 13564), ASASPXXVSQDL (SEQ ID NO: 13688):EPLP (SEQ ID NO: 13564), NDEGLEXVPTEE (SEQ ID NO: 13755):EPLP (SEQ ID NO: 13564), NDEGLEXVPTGQ (SEQ ID NO: 13756):EPLP (SEQ ID NO: 13564), SSVKXQPSRVHH (SEQ ID NO: 13775):EPLP (SEQ ID NO: 13564), RNVQXRPTQVQL (SEQ ID NO: 13758):EPLP (SEQ ID NO: 13564), KIPKAXXVSQEL (SEQ ID NO: 13746):EPLT (SEQ ID NO: 13565), GIPEPXXVSQKM (SEQ ID NO: 13704):EPLT (SEQ ID NO: 13565), SIPKAXXVSQEL (SEQ ID NO: 13774):EPLT (SEQ ID NO: 13565), HVTKPTXVSQKL (SEQ ID NO: 13730):EPLT (SEQ ID NO: 13565), YVPKPXXVSQKL (SEQ ID NO: 13800):EPLT (SEQ ID NO: 13565), TVPKPXXVSQQL (SEQ ID NO: 13792):EPLT (SEQ ID NO: 13565), AVPKAXXVSQKL (SEQ ID NO: 13696):EPLT (SEQ ID NO: 13565), KVGKAXXVSQKL (SEQ ID NO: 13754):EPLT (SEQ ID NO: 13565), KASKAXXVSQKL (SEQ ID NO: 13738):EPLT (SEQ ID NO: 13565), GSAGPXXVSQKM (SEQ ID NO: 13712):EPLT (SEQ ID NO: 13565), AAPASXXVSQRL (SEQ ID NO: 13672):EPLT (SEQ ID NO: 13565), STPPTXXVSQRL (SEQ ID NO: 13784):EPLT (SEQ ID NO: 13565), HVPKPXXVSQKL (SEQ ID NO: 13720):EPLT (SEQ ID NO: 13565), RVPSTXXVSQKT (SEQ ID NO: 13766):EPLT (SEQ ID NO: 13565), ASAAPXXVSQAL (SEQ ID NO: 13680):EPLT (SEQ ID NO: 13565), ASASPXXVSQDL (SEQ ID NO: 13688):EPLT (SEQ ID NO: 13565), KIPKAXXVPTEL (SEQ ID NO: 13745):EPLT (SEQ ID NO: 13565), GIPEPXXVPEKM (SEQ ID NO: 13701):EPLT (SEQ ID NO: 13565), SIPKAXXVPTEL (SEQ ID NO: 13773):EPLT (SEQ ID NO: 13565), HVTKPTXAPTKL (SEQ ID NO: 13721):EPLT (SEQ ID NO: 13565), YVPKPXXAPTKL (SEQ ID NO: 13793):EPLT (SEQ ID NO: 13565), TVPKPXXAPTQL (SEQ ID NO: 13785):EPLT (SEQ ID NO: 13565), AVPKAXXAPTKL (SEQ ID NO: 13689):EPLT (SEQ ID NO: 13565), KVGKAXXVPTKL (SEQ ID NO: 13753):EPLT (SEQ ID NO: 13565), KASKAXXVPTKL (SEQ ID NO: 13737):EPLT (SEQ ID NO: 13565), GSAGPXXTPTKM (SEQ ID NO: 13707):EPLT (SEQ ID NO: 13565), AAPASXXVPARL (SEQ ID NO: 13668):EPLT (SEQ ID NO: 13565), STPPTXXVPTRL (SEQ ID NO: 13783):EPLT (SEQ ID NO: 13565), HVPKPXXAPTKL (SEQ ID NO: 13713):EPLT (SEQ ID NO: 13565), RVPSTXXAPVKT (SEQ ID NO: 13760):EPLT (SEQ ID NO: 13565), ASAAPXXVPQAL (SEQ ID NO: 13678):EPLT (SEQ ID NO: 13565), NDEGLEXVPTEE (SEQ ID NO: 13755):EPLT (SEQ ID NO: 13565), NDEGLEXVPTGQ (SEQ ID NO: 13756):EPLT (SEQ ID NO: 13565), SSVKXQPSRVHH (SEQ ID NO: 13775):EPLT (SEQ ID NO: 13565), RNVQXRPTQVQL (SEQ ID NO: 13758):EPLT (SEQ ID NO: 13565), KIPKAXXVPQEL (SEQ ID NO: 13744):EPLT (SEQ ID NO: 13565), GIPEPXXVPQKM (SEQ ID NO: 13702):EPLT (SEQ ID NO: 13565), SIPKAXXVPQEL (SEQ ID NO: 13772):EPLT (SEQ ID NO: 13565), HVTKPTXVPQKL (SEQ ID NO: 13728):EPLT (SEQ ID NO: 13565), YVPKPXXVPQKL (SEQ ID NO: 13798):EPLT (SEQ ID NO: 13565), TVPKPXXVPQQL (SEQ ID NO: 13790):EPLT (SEQ ID NO: 13565), AVPKAXXVPQKL (SEQ ID NO: 13694):EPLT (SEQ ID NO: 13565), KVGKAXXVPQKL (SEQ ID NO: 13752):EPLT (SEQ ID NO: 13565), KASKAXXVPQKL (SEQ ID NO: 13736):EPLT (SEQ ID NO: 13565), GSAGPXXVPQKM (SEQ ID NO: 13710):EPLT (SEQ ID NO: 13565), AAPASXXVPQRL (SEQ ID NO: 13670):EPLT (SEQ ID NO: 13565), STPPTXXVPQRL (SEQ ID NO: 13782):EPLT (SEQ ID NO: 13565), HVPKPXXVPQKL (SEQ ID NO: 13718):EPLT (SEQ ID NO: 13565), RVPSTXXVPQKT (SEQ ID NO: 13764):EPLT (SEQ ID NO: 13565), ASASPXXVPQDL (SEQ ID NO: 13686):EPLT (SEQ ID NO: 13565), NDEGLEXVPTGQ (SEQ ID NO: 13756):SNIT (SEQ ID NO: 13572), GIPEPXXVPEKM (SEQ ID NO: 13701):SNIT (SEQ ID NO: 13572), HVTKPTXAPTKL (SEQ ID NO: 13721):SNIT (SEQ ID NO: 13572), YVPKPXXAPTKL (SEQ ID NO: 13793):SNIT (SEQ ID NO: 13572), TVPKPXXAPTQL (SEQ ID NO: 13785):SNIT (SEQ ID NO: 13572), AVPKAXXAPTKL (SEQ ID NO: 13689):SNIT (SEQ ID NO: 13572), GSAGPXXTPTKM (SEQ ID NO: 13707):SNIT (SEQ ID NO: 13572), AAPASXXVPARL (SEQ ID NO: 13668):SNIT (SEQ ID NO: 13572), HVPKPXXAPTKL (SEQ ID NO: 13713):SNIT (SEQ ID NO: 13572), RVPSTXXAPVKT (SEQ ID NO: 13760):SNIT (SEQ ID NO: 13572), ASAAPXXVPQAL (SEQ ID NO: 13678):SNIT (SEQ ID NO: 13572), ASASPXXVSQDL (SEQ ID NO: 13688):SNIT (SEQ ID NO: 13572), ASASPXXVPQDL (SEQ ID NO: 13686):SNIT (SEQ ID NO: 13572), SSVKXQPSRVHH (SEQ ID NO: 13775):SNIT (SEQ ID NO: 13572), RNVQXRPTQVQL (SEQ ID NO: 13758):SNIT (SEQ ID NO: 13572), RNVQXRPSRVQL (SEQ ID NO: 13757):RSVK (SEQ ID NO: 13569), KIPKAXXVPTEL (SEQ ID NO: 13745):RSVK (SEQ ID NO: 13569), GIPEPXXVPEKM (SEQ ID NO: 13701):RSVK (SEQ ID NO: 13569), SIPKAXXVPTEL (SEQ ID NO: 13773):RSVK (SEQ ID NO: 13569), HVTKPTXAPTKL (SEQ ID NO: 13721):RSVK (SEQ ID NO: 13569), YVPKPXXAPTKL (SEQ ID NO: 13793):RSVK (SEQ ID NO: 13569), TVPKPXXAPTQL (SEQ ID NO: 13785):RSVK (SEQ ID NO: 13569), AVPKAXXAPTKL (SEQ ID NO: 13689):RSVK (SEQ ID NO: 13569), KVGKAXXVPTKL (SEQ ID NO: 13753):RSVK (SEQ ID NO: 13569), KASKAXXVPTKL (SEQ ID NO: 13737):RSVK (SEQ ID NO: 13569), GSAGPXXTPTKM (SEQ ID NO: 13707):RSVK (SEQ ID NO: 13569), AAPASXXVPARL (SEQ ID NO: 13668):RSVK (SEQ ID NO: 13569), STPPTXXVPTRL (SEQ ID NO: 13783):RSVK (SEQ ID NO: 13569), HVPKPXXAPTKL (SEQ ID NO: 13713):RSVK (SEQ ID NO: 13569), RVPSTXXAPVKT (SEQ ID NO: 13760):RSVK (SEQ ID NO: 13569), ASAAPXXVPQAL (SEQ ID NO: 13678):RSVK (SEQ ID NO: 13569), ASASPXXVSQDL (SEQ ID NO: 13688):RSVK (SEQ ID NO: 13569), ASASPXXVPQDL (SEQ ID NO: 13686):RSVK (SEQ ID NO: 13569), NDEGLEXVPTEE (SEQ ID NO: 13755):RSVK (SEQ ID NO: 13569), NDEGLEXVPTGQ (SEQ ID NO: 13756):RSVK (SEQ ID NO: 13569), RNVQXRPTQVQL (SEQ ID NO: 13758):RSVK (SEQ ID NO: 13569), SSVKXQPTQVHH (SEQ ID NO: 13776):RPVQ (SEQ ID NO: 13568), KIPKAXXVPTEL (SEQ ID NO: 13745):RPVQ (SEQ ID NO: 13568), GIPEPXXVPEKM (SEQ ID NO: 13701):RPVQ (SEQ ID NO: 13568), SIPKAXXVPTEL (SEQ ID NO: 13773):RPVQ (SEQ ID NO: 13568), HVTKPTXAPTKL (SEQ ID NO: 13721):RPVQ (SEQ ID NO: 13568), YVPKPXXAPTKL (SEQ ID NO: 13793):RPVQ (SEQ ID NO: 13568), TVPKPXXAPTQL (SEQ ID NO: 13785):RPVQ (SEQ ID NO: 13568), AVPKAXXAPTKL (SEQ ID NO: 13689):RPVQ (SEQ ID NO: 13568), KVGKAXXVPTKL (SEQ ID NO: 13753):RPVQ (SEQ ID NO: 13568), KASKAXXVPTKL (SEQ ID NO: 13737):RPVQ (SEQ ID NO: 13568), GSAGPXXTPTKM (SEQ ID NO: 13707):RPVQ (SEQ ID NO: 13568), AAPASXXVPARL (SEQ ID NO: 13668):RPVQ (SEQ ID NO: 13568), STPPTXXVPTRL (SEQ ID NO: 13783):RPVQ (SEQ ID NO: 13568), HVPKPXXAPTKL (SEQ ID NO: 13713):RPVQ (SEQ ID NO: 13568), RVPSTXXAPVKT (SEQ ID NO: 13760):RPVQ (SEQ ID NO: 13568), ASAAPXXVPQAL (SEQ ID NO: 13678):RPVQ (SEQ ID NO: 13568), ASASPXXVSQDL (SEQ ID NO: 13688):RPVQ (SEQ ID NO: 13568), ASASPXXVPQDL (SEQ ID NO: 13686):RPVQ (SEQ ID NO: 13568), NDEGLEXVPTEE (SEQ ID NO: 13755):RPVQ (SEQ ID NO: 13568), NDEGLEXVPTGQ (SEQ ID NO: 13756):RPVQ (SEQ ID NO: 13568) and SSVKXQPSRVHH (SEQ ID NO: 13775):RPVQ (SEQ ID NO: 13568).

[0378] In particular, in certain embodiments, the pair PEP3:PEP12 is selected from the group consisting of VPT:SAIS-AA¹⁷-LYL (SEQ ID NO: 13808), VPE:SAIS-AA¹⁷-LYL (SEQ ID NO: 13808), APT:SAIS-AA¹⁷-LYL (SEQ ID NO: 13808), TPT:SAIS-AA¹⁷-LYL (SEQ ID NO: 13808), VPA:SAIS-AA¹⁷-LYL (SEQ ID NO: 13808), APV:SAIS-AA¹⁷-LYL (SEQ ID NO: 13808), VPQ:SAIS-AA¹⁷-LYL (SEQ ID NO: 13808), VSQ:SAIS-AA¹⁷-LYL (SEQ ID NO: 13808), SRV:SAIS-AA¹⁷-LYL (SEQ ID NO: 13808), TQV:SAIS-AA¹⁷-LYL (SEQ ID NO: 13808), VPE:SSLS-AA¹⁷-LFF (SEQ ID NO: 13815), VPT:SSLS-AA¹⁷-LFF (SEQ ID NO: 13815), APT:SSLS-AA¹⁷-LFF (SEQ ID NO: 13815), TPT:SSLS-AA¹⁷-LFF (SEQ ID NO: 13815), VPA:SSLS-AA¹⁷-LFF (SEQ ID NO: 13815), APV:SSLS-AA¹⁷-LFF (SEQ ID NO: 13815), VPQ:SSLS-AA¹⁷-LFF (SEQ ID NO: 13815), VSQ:SSLS-AA¹⁷-LFF (SEQ ID NO: 13815), SRV:SSLS-AA¹⁷-LFF (SEQ ID NO: 13815), TQV:SSLS-AA¹⁷-LFF (SEQ ID NO: 13815), APT:NAIS-AA¹⁷-LYF (SEQ ID NO: 13805), VPT:NAIS-AA¹⁷-LYF (SEQ ID NO: 13805), VPE:NAIS-AA¹⁷-LYF (SEQ ID NO: 13805), TPT:NAIS-AA¹⁷-LYF (SEQ ID NO: 13805), VPA:NAIS-AA¹⁷-LYF (SEQ ID NO: 13805), APV:NAIS-AA¹⁷-LYF (SEQ ID NO: 13805), VPQ:NAIS-AA¹⁷-LYF (SEQ ID NO: 13805), VSQ:NAIS-AA¹⁷-LYF (SEQ ID NO: 13805), SRV:NAIS-AA¹⁷-LYF (SEQ ID NO: 13805), TQV:NAIS-AA¹⁷-LYF (SEQ ID NO: 13805), APT:SATS-AA¹⁷-LYY (SEQ ID NO: 13809), VPT:SATS-AA¹⁷-LYY (SEQ ID NO: 13809), VPE:SATS-AA¹⁷-LYY (SEQ ID NO: 13809), TPT:SATS-AA¹⁷-LYY (SEQ ID NO: 13809), VPA:SATS-AA¹⁷-LYY (SEQ ID NO: 13809), APV:SATS-AA¹⁷-LYY (SEQ ID NO: 13809), VPQ:SATS-AA¹⁷-LYY (SEQ ID NO: 13809), VSQ:SATS-AA¹⁷-LYY (SEQ ID NO: 13809), SRV:SATS-AA¹⁷-LYY (SEQ ID NO: 13809), TQV:SATS-AA¹⁷-LYY (SEQ ID NO: 13809), VPT:SPIS-AA¹⁷-LYK (SEQ ID NO: 13814), VPE:SPIS-AA¹⁷-LYK (SEQ ID NO: 13814), APT:SPIS-AA¹⁷-LYK (SEQ ID NO: 13814), TPT:SPIS-AA¹⁷-LYK (SEQ ID NO: 13814), VPA:SPIS-AA¹⁷-LYK (SEQ ID NO: 13814), APV:SPIS-AA¹⁷-LYK (SEQ ID NO: 13814), VPQ:SPIS-AA¹⁷-LYK (SEQ ID NO: 13814), VSQ:SPIS-AA¹⁷-LYK (SEQ ID NO: 13814), SRV:SPIS-AA¹⁷-LYK (SEQ ID NO: 13814), TQV:SPIS-AA¹⁷-LYK (SEQ ID NO: 13814), VPT:EPIS-AA¹⁷-LYL (SEQ ID NO: 13801), VPE:EPIS-AA¹⁷-LYL (SEQ ID NO: 13801), APT:EPIS-AA¹⁷-LYL (SEQ ID NO: 13801), TPT:EPIS-AA¹⁷-LYL (SEQ ID NO: 13801), VPA:EPIS-AA¹⁷-LYL (SEQ ID NO: 13801), APV:EPIS-AA¹⁷-LYL (SEQ ID NO: 13801), VPQ:EPIS-AA¹⁷-LYL (SEQ ID NO: 13801), VSQ:EPIS-AA¹⁷-LYL (SEQ ID NO: 13801), SRV:EPIS-AA¹⁷-LYL (SEQ ID NO: 13801), TQV:EPIS-AA¹⁷-LYL (SEQ ID NO: 13801), TPT:SPIN-AA¹⁷-LYF (SEQ ID NO: 13811), VPT:SPIN-AA¹⁷-LYF (SEQ ID NO: 13811), VPE:SPIN-AA¹⁷-LYF (SEQ ID NO: 13811), APT:SPIN-AA¹⁷-LYF (SEQ ID NO: 13811), VPA:SPIN-AA¹⁷-LYF (SEQ ID NO: 13811), APV:SPIN-AA¹⁷-LYF (SEQ ID NO: 13811), VPQ:SPIN-AA¹⁷-LYF (SEQ ID NO: 13811), VSQ:SPIN-AA¹⁷-LYF (SEQ ID NO: 13811), SRV:SPIN-AA¹⁷-LYF (SEQ ID NO: 13811), TQV:SPIN-AA¹⁷-LYF (SEQ ID NO: 13811), VPA:SPIS-AA¹⁷-LYI (SEQ ID NO: 13813), VPT:SPIS-AA¹⁷-LYI (SEQ ID NO: 13813), VPE:SPIS-AA¹⁷-LYI (SEQ ID NO: 13813), APT:SPIS-AA¹⁷-LYI (SEQ ID NO: 13813), TPT:SPIS-AA¹⁷-LYI (SEQ ID NO: 13813), APV:SPIS-AA¹⁷-LYI (SEQ ID NO: 13813), VPQ:SPIS-AA¹⁷-LYI (SEQ ID NO: 13813), VSQ:SPIS-AA¹⁷-LYI (SEQ ID NO: 13813), SRV:SPIS-AA¹⁷-LYI (SEQ ID NO: 13813), TQV:SPIS-AA¹⁷-LYI (SEQ ID NO: 13813), VPT:SPIS-AA¹⁷-LFI (SEQ ID NO: 13812), VPE:SPIS-AA¹⁷-LFI (SEQ ID NO: 13812), APT:SPIS-AA¹⁷-LFI (SEQ ID NO: 13812), TPT:SPIS-AA¹⁷-LFI (SEQ ID NO: 13812), VPA:SPIS-AA¹⁷-LFI (SEQ ID NO: 13812), APV:SPIS-AA¹⁷-LFI (SEQ ID NO: 13812), VPQ:SPIS-AA¹⁷-LFI (SEQ ID NO: 13812), VSQ:SPIS-AA¹⁷-LFI (SEQ ID NO: 13812), SRV:SPIS-AA¹⁷-LFI (SEQ ID NO: 13812), TQV:SPIS-AA¹⁷-LFI (SEQ ID NO: 13812), APV:KPLS-AA¹⁷-LYV (SEQ ID NO: 13804), VPT:KPLS-AA¹⁷-LYV (SEQ ID NO: 13804), VPE:KPLS-AA¹⁷-LYV (SEQ ID NO: 13804), APT:KPLS-AA¹⁷-LYV (SEQ ID NO: 13804), TPT:KPLS-AA¹⁷-LYV (SEQ ID NO: 13804), VPA:KPLS-AA¹⁷-LYV (SEQ ID NO: 13804), VPQ:KPLS-AA¹⁷-LYV (SEQ ID NO: 13804), VSQ:KPLS-AA¹⁷-LYV (SEQ ID NO: 13804), SRV:KPLS-AA¹⁷-LYV (SEQ ID NO: 13804), TQV:KPLS-AA¹⁷-LYV (SEQ ID NO: 13804), VPQ:EPLP-AA¹⁷-VYY (SEQ ID NO: 13802), VPT:EPLP-AA¹⁷-VYY (SEQ ID NO: 13802), VPE:EPLP-AA¹⁷-VYY (SEQ ID NO: 13802), APT:EPLP-AA¹⁷-VYY (SEQ ID NO: 13802), TPT:EPLP-AA¹⁷-VYY (SEQ ID NO: 13802), VPA:EPLP-AA¹⁷-VYY (SEQ ID NO: 13802), APV:EPLP-AA¹⁷-VYY (SEQ ID NO: 13802), VSQ:EPLP-AA¹⁷-VYY (SEQ ID NO: 13802), SRV:EPLP-AA¹⁷-VYY (SEQ ID NO: 13802), TQV:EPLP-AA¹⁷-VYY (SEQ ID NO: 13802), VSQ:EPLT-AA¹⁷-LYY (SEQ ID NO: 13803), VPT:EPLT-AA¹⁷-LYY (SEQ ID NO: 13803), VPE:EPLT-AA¹⁷-LYY (SEQ ID NO: 13803), APT:EPLT-AA¹⁷-LYY (SEQ ID NO: 13803), TPT:EPLT-AA¹⁷-LYY (SEQ ID NO: 13803), VPA:EPLT-AA¹⁷-LYY (SEQ ID NO: 13803), APV:EPLT-AA¹⁷-LYY (SEQ ID NO: 13803), VPQ:EPLT-AA¹⁷-LYY (SEQ ID NO: 13803), SRV:EPLT-AA¹⁷-LYY (SEQ ID NO: 13803), TQV:EPLT-AA¹⁷-LYY (SEQ ID NO: 13803), VPT:SNIT-AA¹⁷-QIM (SEQ ID NO: 13810), VPE:SNIT-AA¹⁷-QIM (SEQ ID NO: 13810), APT:SNIT-AA¹⁷-QIM (SEQ ID NO: 13810), TPT:SNIT-AA¹⁷-QIM (SEQ ID NO: 13810), VPA:SNIT-AA¹⁷-QIM (SEQ ID NO: 13810), APV:SNIT-AA¹⁷-QIM (SEQ ID NO: 13810), VPQ:SNIT-AA¹⁷-QIM (SEQ ID NO: 13810), VSQ:SNIT-AA¹⁷-QIM (SEQ ID NO: 13810), SRV:SNIT-AA¹⁷-QIM (SEQ ID NO: 13810), TQV:SNIT-AA¹⁷-QIM (SEQ ID NO: 13810), SRV:RSVK-AA¹⁷-AKV (SEQ ID NO: 13807), VPT:RSVK-AA¹⁷-AKV (SEQ ID NO: 13807), VPE:RSVK-AA¹⁷-AKV (SEQ ID NO: 13807), APT:RSVK-AA¹⁷-AKV (SEQ ID NO: 13807), TPT:RSVK-AA¹⁷-AKV (SEQ ID NO: 13807), VPA:RSVK-AA¹⁷-AKV (SEQ ID NO: 13807), APV:RSVK-AA¹⁷-AKV (SEQ ID NO: 13807), VPQ:RSVK-AA¹⁷-AKV (SEQ ID NO: 13807), VSQ:RSVK-AA¹⁷-AKV (SEQ ID NO: 13807), TQV:RSVK-AA¹⁷-AKV (SEQ ID NO: 13807), TQV:RPVQ-AA¹⁷-RKI (SEQ ID NO: 13806), VPT:RPVQ-AA¹⁷-RKI (SEQ ID NO: 13806), VPE:RPVQ-AA¹⁷-RKI (SEQ ID NO: 13806), APT:RPVQ-AA¹⁷-RKI (SEQ ID NO: 13806), TPT:RPVQ-AA¹⁷-RKI (SEQ ID NO: 13806), VPA:RPVQ-AA¹⁷-RKI (SEQ ID NO: 13806), APV:RPVQ-AA¹⁷-RKI (SEQ ID NO: 13806), VPQ:RPVQ-AA¹⁷-RKI (SEQ ID NO: 13806), VSQ:RPVQ-AA¹⁷-RKI (SEQ ID NO: 13806) and SRV:RPVQ-AA¹⁷-RKI (SEQ ID NO: 13806); and wherein AA¹⁷ is selected from the group consisting of G, A, V, L, I, P, F, M, W, T and S (in particular is selected from the group consisting of M, I, L, V and T).

[0379] In particular, in certain embodiments, the pair PEP12:PEP5 is selected from the group consisting of VPTKM (SEQ ID NO: 13634):SAIS-AA¹⁷-LYL (SEQ ID NO: 13808), VPTKL (SEQ ID NO: 13633):SAIS-AA¹⁷-LYL (SEQ ID NO: 13808), VPTQL (SEQ ID NO: 13636):SAIS-AA¹⁷-LYL (SEQ ID NO: 13808), VPTRL (SEQ ID NO: 13637):SAIS-AA¹⁷-LYL (SEQ ID NO: 13808), VPTKT (SEQ ID NO: 13635):SAIS-AA¹⁷-LYL (SEQ ID NO: 13808), VPTAL (SEQ ID NO: 13628):SAIS-AA¹⁷-LYL (SEQ ID NO: 13808), VPTDL (SEQ ID NO: 13629):SAIS-AA¹⁷-LYL (SEQ ID NO: 13808), VPEKM (SEQ ID NO: 13616):SAIS-AA¹⁷-LYL (SEQ ID NO: 13808), APTKL (SEQ ID NO: 13579):SAIS-AA¹⁷-LYL (SEQ ID NO: 13808), APTQL (SEQ ID NO: 13582):SAIS-AA¹⁷-LYL (SEQ ID NO: 13808), TPTKM (SEQ ID NO: 13598):SAIS-AA¹⁷-LYL (SEQ ID NO: 13808), VPARL (SEQ ID NO: 13611):SAIS-AA¹⁷-LYL (SEQ ID NO: 13808), APVKT (SEQ ID NO: 13589):SAIS-AA¹⁷-LYL (SEQ ID NO: 13808), VPQAL (SEQ ID NO: 13620):SAIS-AA¹⁷-LYL (SEQ ID NO: 13808), VSQDL (SEQ ID NO: 13639):SAIS-AA¹⁷-LYL (SEQ ID NO: 13808), VPQDL (SEQ ID NO: 13621):SAIS-AA¹⁷-LYL (SEQ ID NO: 13808), SRVHH (SEQ ID NO: 13592):SAIS-AA¹⁷-LYL (SEQ ID NO: 13808), TQVQL (SEQ ID NO: 13603):SAIS-AA¹⁷-LYL (SEQ ID NO: 13808), VPEEL (SEQ ID NO: 13614):SSLS-AA¹⁷-LFF (SEQ ID NO: 13815), VPEKL (SEQ ID NO: 13615):SSLS-AA¹⁷-LFF (SEQ ID NO: 13815), VPEQL (SEQ ID NO: 13618):SSLS-AA¹⁷-LFF (SEQ ID NO: 13815), VPEKM (SEQ ID NO: 13616):SSLS-AA¹⁷-LFF (SEQ ID NO: 13815), VPERL (SEQ ID NO: 13619):SSLS-AA¹⁷-LFF (SEQ ID NO: 13815), VPEKT (SEQ ID NO: 13617):SSLS-AA¹⁷-LFF (SEQ ID NO: 13815), VPEAL (SEQ ID NO: 13612):SSLS-AA¹⁷-LFF (SEQ ID NO: 13815), VPEDL (SEQ ID NO: 13613):SSLS-AA¹⁷-LFF (SEQ ID NO: 13815), VPTEL (SEQ ID NO: 13631):SSLS-AA¹⁷-LFF (SEQ ID NO: 13815), APTKL (SEQ ID NO: 13579):SSLS-AA¹⁷-LFF (SEQ ID NO: 13815), APTQL (SEQ ID NO: 13582):SSLS-AA¹⁷-LFF (SEQ ID NO: 13815), VPTKL (SEQ ID NO: 13633):SSLS-AA¹⁷-LFF (SEQ ID NO: 13815), TPTKM (SEQ ID NO: 13598):SSLS-AA¹⁷-LFF (SEQ ID NO: 13815), VPARL (SEQ ID NO: 13611):SSLS-AA¹⁷-LFF (SEQ ID NO: 13815), VPTRL (SEQ ID NO: 13637):SSLS-AA¹⁷-LFF (SEQ ID NO: 13815), APVKT (SEQ ID NO: 13589):SSLS-AA¹⁷-LFF (SEQ ID NO: 13815), VPQAL (SEQ ID NO: 13620):SSLS-AA¹⁷-LFF (SEQ ID NO: 13815), VSQDL (SEQ ID NO: 13639):SSLS-AA¹⁷-LFF (SEQ ID NO: 13815), VPQDL (SEQ ID NO: 13621):SSLS-AA¹⁷-LFF (SEQ ID NO: 13815), VPTEE (SEQ ID NO: 13630):SSLS-AA¹⁷-LFF (SEQ ID NO: 13815), VPTGQ (SEQ ID NO: 13632):SSLS-AA¹⁷-LFF (SEQ ID NO: 13815), SRVHH (SEQ ID NO: 13592):SSLS-AA¹⁷-LFF (SEQ ID NO: 13815), TQVQL (SEQ ID NO: 13603):SSLS-AA¹⁷-LFF (SEQ ID NO: 13815), APTEL (SEQ ID NO: 13578):NAIS-AA¹⁷-LYF (SEQ ID NO: 13805), APTKM (SEQ ID NO: 13580):NAIS-AA¹⁷-LYF (SEQ ID NO: 13805), APTKL (SEQ ID NO: 13579):NAIS-AA¹⁷-LYF (SEQ ID NO: 13805), APTRL (SEQ ID NO: 13583):NAIS-AA¹⁷-LYF (SEQ ID NO: 13805), APTKT (SEQ ID NO: 13581):NAIS-AA¹⁷-LYF (SEQ ID NO: 13805), APTAL (SEQ ID NO: 13576):NAIS-AA¹⁷-LYF (SEQ ID NO: 13805), APTDL (SEQ ID NO: 13577):NAIS-AA¹⁷-LYF (SEQ ID NO: 13805), VPTEL (SEQ ID NO: 13631):NAIS-AA¹⁷-LYF (SEQ ID NO: 13805), VPEKM (SEQ ID NO: 13616):NAIS-AA¹⁷-LYF (SEQ ID NO: 13805), VPTKL (SEQ ID NO: 13633):NAIS-AA¹⁷-LYF (SEQ ID NO: 13805), TPTKM (SEQ ID NO: 13598):NAIS-AA¹⁷-LYF (SEQ ID NO: 13805), VPARL (SEQ ID NO: 13611):NAIS-AA¹⁷-LYF (SEQ ID NO: 13805), VPTRL (SEQ ID NO: 13637):NAIS-AA¹⁷-LYF (SEQ ID NO: 13805), APVKT (SEQ ID NO: 13589):NAIS-AA¹⁷-LYF (SEQ ID NO: 13805), VPQAL (SEQ ID NO: 13620):NAIS-AA¹⁷-LYF (SEQ ID NO: 13805), VSQDL (SEQ ID NO: 13639):NAIS-AA¹⁷-LYF (SEQ ID NO: 13805), VPQDL (SEQ ID NO: 13621):NAIS-AA¹⁷-LYF (SEQ ID NO: 13805), VPTEE (SEQ ID NO: 13630):NAIS-AA¹⁷-LYF (SEQ ID NO: 13805), VPTGQ (SEQ ID NO: 13632):NAIS-AA¹⁷-LYF (SEQ ID NO: 13805), SRVHH (SEQ ID NO: 13592):NAIS-AA¹⁷-LYF (SEQ ID NO: 13805), TQVQL (SEQ ID NO: 13603):NAIS-AA¹⁷-LYF (SEQ ID NO: 13805), APTEL (SEQ ID NO: 13578):SATS-AA¹⁷-LYY (SEQ ID NO: 13809), APTKM (SEQ ID NO: 13580):SATS-AA¹⁷-LYY (SEQ ID NO: 13809), APTKL (SEQ ID NO: 13579):SATS-AA¹⁷-LYY (SEQ ID NO: 13809), APTQL (SEQ ID NO: 13582):SATS-AA¹⁷-LYY (SEQ ID NO: 13809), APTRL (SEQ ID NO: 13583):SATS-AA¹⁷-LYY (SEQ ID NO: 13809), APTKT (SEQ ID NO: 13581):SATS-AA¹⁷-LYY (SEQ ID NO: 13809), APTAL (SEQ ID NO: 13576):SATS-AA¹⁷-LYY (SEQ ID NO: 13809), APTDL (SEQ ID NO: 13577):SATS-AA¹⁷-LYY (SEQ ID NO: 13809), VPTEL (SEQ ID NO: 13631):SATS-AA¹⁷-LYY (SEQ ID NO: 13809), VPEKM (SEQ ID NO: 13616):SATS-AA¹⁷-LYY (SEQ ID NO: 13809), VPTKL (SEQ ID NO: 13633):SATS-AA¹⁷-LYY (SEQ ID NO: 13809), TPTKM (SEQ ID NO: 13598):SATS-AA¹⁷-LYY (SEQ ID NO: 13809), VPARL (SEQ ID NO: 13611):SATS-AA¹⁷-LYY (SEQ ID NO: 13809), VPTRL (SEQ ID NO: 13637):SATS-AA¹⁷-LYY (SEQ ID NO: 13809), APVKT (SEQ ID NO: 13589):SATS-AA¹⁷-LYY (SEQ ID NO: 13809), VPQAL (SEQ ID NO: 13620):SATS-AA¹⁷-LYY (SEQ ID NO: 13809), VSQDL (SEQ ID NO: 13639):SATS-AA¹⁷-LYY (SEQ ID NO: 13809), VPQDL (SEQ ID NO: 13621):SATS-AA¹⁷-LYY (SEQ ID NO: 13809), VPTEE (SEQ ID NO: 13630):SATS-AA¹⁷-LYY (SEQ ID NO: 13809), VPTGQ (SEQ ID NO: 13632):SATS-AA¹⁷-LYY (SEQ ID NO: 13809), SRVHH (SEQ ID NO: 13592):SATS-AA¹⁷-LYY (SEQ ID NO: 13809), TQVQL (SEQ ID NO: 13603):SATS-AA¹⁷-LYY (SEQ ID NO: 13809), VPTEL (SEQ ID NO: 13631):SPIS-AA¹⁷-LYK (SEQ ID NO: 13814), VPTKM (SEQ ID NO: 13634):SPIS-AA¹⁷-LYK (SEQ ID NO: 13814), VPTKL (SEQ ID NO: 13633):SPIS-AA¹⁷-LYK (SEQ ID NO: 13814), VPTQL (SEQ ID NO: 13636):SPIS-AA¹⁷-LYK (SEQ ID NO: 13814), VPTRL (SEQ ID NO: 13637):SPIS-AA¹⁷-LYK (SEQ ID NO: 13814), VPTKT (SEQ ID NO: 13635):SPIS-AA¹⁷-LYK (SEQ ID NO: 13814), VPTAL (SEQ ID NO: 13628):SPIS-AA¹⁷-LYK (SEQ ID NO: 13814), VPTDL (SEQ ID NO: 13629):SPIS-AA¹⁷-LYK (SEQ ID NO: 13814), VPEKM (SEQ ID NO: 13616):SPIS-AA¹⁷-LYK (SEQ ID NO: 13814), APTKL (SEQ ID NO: 13579):SPIS-AA¹⁷-LYK (SEQ ID NO: 13814), APTQL (SEQ ID NO: 13582):SPIS-AA¹⁷-LYK (SEQ ID NO: 13814), TPTKM (SEQ ID NO: 13598):SPIS-AA¹⁷-LYK (SEQ ID NO: 13814), VPARL (SEQ ID NO: 13611):SPIS-AA¹⁷-LYK (SEQ ID NO: 13814), APVKT (SEQ ID NO: 13589):SPIS-AA¹⁷-LYK (SEQ ID NO: 13814), VPQAL (SEQ ID NO: 13620):SPIS-AA¹⁷-LYK (SEQ ID NO: 13814), VSQDL (SEQ ID NO: 13639):SPIS-AA¹⁷-LYK (SEQ ID NO: 13814), VPQDL (SEQ ID NO: 13621):SPIS-AA¹⁷-LYK (SEQ ID NO: 13814), SRVHH (SEQ ID NO: 13592):SPIS-AA¹⁷-LYK (SEQ ID NO: 13814), TQVQL (SEQ ID NO: 13603):SPIS-AA¹⁷-LYK (SEQ ID NO: 13814), VPTEL (SEQ ID NO: 13631):EPIS-AA¹⁷-LYL (SEQ ID NO: 13801), VPTKM (SEQ ID NO: 13634):EPIS-AA¹⁷-LYL (SEQ ID NO: 13801), VPTKL (SEQ ID NO: 13633):EPIS-AA¹⁷-LYL (SEQ ID NO: 13801), VPTQL (SEQ ID NO: 13636):EPIS-AA¹⁷-LYL (SEQ ID NO: 13801), VPTRL (SEQ ID NO: 13637):EPIS-AA¹⁷-LYL (SEQ ID NO: 13801), VPTKT (SEQ ID NO: 13635):EPIS-AA¹⁷-LYL (SEQ ID NO: 13801), VPTAL (SEQ ID NO: 13628):EPIS-AA¹⁷-LYL (SEQ ID NO: 13801), VPTDL (SEQ ID NO: 13629):EPIS-AA¹⁷-LYL (SEQ ID NO: 13801), VPEKM (SEQ ID NO: 13616):EPIS-AA¹⁷-LYL (SEQ ID NO: 13801), APTKL (SEQ ID NO: 13579):EPIS-AA¹⁷-LYL (SEQ ID NO: 13801), APTQL (SEQ ID NO: 13582):EPIS-AA¹⁷-LYL (SEQ ID NO: 13801), TPTKM (SEQ ID NO: 13598):EPIS-AA¹⁷-LYL (SEQ ID NO: 13801), VPARL (SEQ ID NO: 13611):EPIS-AA¹⁷-LYL (SEQ ID NO: 13801), APVKT (SEQ ID NO: 13589):EPIS-AA¹⁷-LYL (SEQ ID NO: 13801), VPQAL (SEQ ID NO: 13620):EPIS-AA¹⁷-LYL (SEQ ID NO: 13801), VSQDL (SEQ ID NO: 13639):EPIS-AA¹⁷-LYL (SEQ ID NO: 13801), VPQDL (SEQ ID NO: 13621):EPIS-AA¹⁷-LYL (SEQ ID NO: 13801), SRVHH (SEQ ID NO: 13592):EPIS-AA¹⁷-LYL (SEQ ID NO: 13801), TQVQL (SEQ ID NO: 13603):EPIS-AA¹⁷-LYL (SEQ ID NO: 13801), TPTEL (SEQ ID NO: 13596):SPIN-AA¹⁷-LYF (SEQ ID NO: 13811), TPTKM (SEQ ID NO: 13598):SPIN-AA¹⁷-LYF (SEQ ID NO: 13811), TPTKL (SEQ ID NO: 13597):SPIN-AA¹⁷-LYF (SEQ ID NO: 13811), TPTQL (SEQ ID NO: 13600):SPIN-AA¹⁷-LYF (SEQ ID NO: 13811), TPTRL (SEQ ID NO: 13601):SPIN-AA¹⁷-LYF (SEQ ID NO: 13811), TPTKT (SEQ ID NO: 13599):SPIN-AA¹⁷-LYF (SEQ ID NO: 13811), TPTAL (SEQ ID NO: 13594):SPIN-AA¹⁷-LYF (SEQ ID NO: 13811), TPTDL (SEQ ID NO: 13595):SPIN-AA¹⁷-LYF (SEQ ID NO: 13811), VPTEL (SEQ ID NO: 13631):SPIN-AA¹⁷-LYF (SEQ ID NO: 13811), VPEKM (SEQ ID NO: 13616):SPIN-AA¹⁷-LYF (SEQ ID NO: 13811), APTKL (SEQ ID NO: 13579):SPIN-AA¹⁷-LYF (SEQ ID NO: 13811), APTQL (SEQ ID NO: 13582):SPIN-AA¹⁷-LYF (SEQ ID NO: 13811), VPTKL (SEQ ID NO: 13633):SPIN-AA¹⁷-LYF (SEQ ID NO: 13811), VPARL (SEQ ID NO: 13611):SPIN-AA¹⁷-LYF (SEQ ID NO: 13811), VPTRL (SEQ ID NO: 13637):SPIN-AA¹⁷-LYF (SEQ ID NO: 13811), APVKT (SEQ ID NO: 13589):SPIN-AA¹⁷-LYF (SEQ ID NO: 13811), VPQAL (SEQ ID NO: 13620):SPIN-AA¹⁷-LYF (SEQ ID NO: 13811), VSQDL (SEQ ID NO: 13639):SPIN-AA¹⁷-LYF (SEQ ID NO: 13811), VPQDL (SEQ ID NO: 13621):SPIN-AA¹⁷-LYF (SEQ ID NO: 13811), VPTEE (SEQ ID NO: 13630):SPIN-AA¹⁷-LYF (SEQ ID NO: 13811), VPTGQ (SEQ ID NO: 13632):SPIN-AA¹⁷-LYF (SEQ ID NO: 13811), SRVHH (SEQ ID NO: 13592):SPIN-AA¹⁷-LYF (SEQ ID NO: 13811), TQVQL (SEQ ID NO: 13603):SPIN-AA¹⁷-LYF (SEQ ID NO: 13811), VPAEL (SEQ ID NO: 13606):SPIS-AA¹⁷-LYI (SEQ ID NO: 13813), VPAKM (SEQ ID NO: 13608):SPIS-AA¹⁷-LYI (SEQ ID NO: 13813), VPAKL (SEQ ID NO: 13607):SPIS-AA¹⁷-LYI (SEQ ID NO: 13813), VPAQL (SEQ ID NO: 13610):SPIS-AA¹⁷-LYI (SEQ ID NO: 13813), VPARL (SEQ ID NO: 13611):SPIS-AA¹⁷-LYI (SEQ ID NO: 13813), VPAKT (SEQ ID NO: 13609):SPIS-AA¹⁷-LYI (SEQ ID NO: 13813), VPAAL (SEQ ID NO: 13604):SPIS-AA¹⁷-LYI (SEQ ID NO: 13813), VPADL (SEQ ID NO: 13605):SPIS-AA¹⁷-LYI (SEQ ID NO: 13813), VPTEL (SEQ ID NO: 13631):SPIS-AA¹⁷-LYI (SEQ ID NO: 13813), VPEKM (SEQ ID NO: 13616):SPIS-AA¹⁷-LYI (SEQ ID NO: 13813), APTKL (SEQ ID NO: 13579):SPIS-AA¹⁷-LYI (SEQ ID NO: 13813), APTQL (SEQ ID NO: 13582):SPIS-AA¹⁷-LYI (SEQ ID NO: 13813), VPTKL (SEQ ID NO: 13633):SPIS-AA¹⁷-LYI (SEQ ID NO: 13813), TPTKM (SEQ ID NO: 13598):SPIS-AA¹⁷-LYI (SEQ ID NO: 13813), VPTRL (SEQ ID NO: 13637):SPIS-AA¹⁷-LYI (SEQ ID NO: 13813), APVKT (SEQ ID NO: 13589):SPIS-AA¹⁷-LYI (SEQ ID NO: 13813), VPQAL (SEQ ID NO: 13620):SPIS-AA¹⁷-LYI (SEQ ID NO: 13813), VSQDL (SEQ ID NO: 13639):SPIS-AA¹⁷-LYI (SEQ ID NO: 13813), VPQDL (SEQ ID NO: 13621):SPIS-AA¹⁷-LYI (SEQ ID NO: 13813), VPTEE (SEQ ID NO: 13630):SPIS-AA¹⁷-LYI (SEQ ID NO: 13813), VPTGQ (SEQ ID NO: 13632):SPIS-AA¹⁷-LYI (SEQ ID NO: 13813), SRVHH (SEQ ID NO: 13592):SPIS-AA¹⁷-LYI (SEQ ID NO: 13813), TQVQL (SEQ ID NO: 13603):SPIS-AA¹⁷-LYI (SEQ ID NO: 13813), VPTEL (SEQ ID NO: 13631):SPIS-AA¹⁷-LFI (SEQ ID NO: 13812), VPTKM (SEQ ID NO: 13634):SPIS-AA¹⁷-LFI (SEQ ID NO: 13812), VPTKL (SEQ ID NO: 13633):SPIS-AA¹⁷-LFI (SEQ ID NO: 13812), VPTQL (SEQ ID NO: 13636):SPIS-AA¹⁷-LFI (SEQ ID NO: 13812), VPTRL (SEQ ID NO: 13637):SPIS-AA¹⁷-LFI (SEQ ID NO: 13812), VPTKT (SEQ ID NO: 13635):SPIS-AA¹⁷-LFI (SEQ ID NO: 13812), VPTAL (SEQ ID NO: 13628):SPIS-AA¹⁷-LFI (SEQ ID NO: 13812), VPTDL (SEQ ID NO: 13629):SPIS-AA¹⁷-LFI (SEQ ID NO: 13812), VPEKM (SEQ ID NO: 13616):SPIS-AA¹⁷-LFI (SEQ ID NO: 13812), APTKL (SEQ ID NO: 13579):SPIS-AA¹⁷-LFI (SEQ ID NO: 13812), APTQL (SEQ ID NO: 13582):SPIS-AA¹⁷-LFI (SEQ ID NO: 13812), TPTKM (SEQ ID NO: 13598):SPIS-AA¹⁷-LFI (SEQ ID NO: 13812), VPARL (SEQ ID NO: 13611):SPIS-AA¹⁷-LFI (SEQ ID NO: 13812), APVKT (SEQ ID NO: 13589):SPIS-AA¹⁷-LFI (SEQ ID NO: 13812), VPQAL (SEQ ID NO: 13620):SPIS-AA¹⁷-LFI (SEQ ID NO: 13812), VSQDL (SEQ ID NO: 13639):SPIS-AA¹⁷-LFI (SEQ ID NO: 13812), VPQDL (SEQ ID NO: 13621):SPIS-AA¹⁷-LFI (SEQ ID NO: 13812), SRVHH (SEQ ID NO: 13592):SPIS-AA¹⁷-LFI (SEQ ID NO: 13812), TQVQL (SEQ ID NO: 13603):SPIS-AA¹⁷-LFI (SEQ ID NO: 13812), APVEL (SEQ ID NO: 13586):KPLS-AA¹⁷-LYV (SEQ ID NO: 13804), APVKM (SEQ ID NO: 13588):KPLS-AA¹⁷-LYV (SEQ ID NO: 13804), APVKL (SEQ ID NO: 13587):KPLS-AA¹⁷-LYV (SEQ ID NO: 13804), APVQL (SEQ ID NO: 13590):KPLS-AA¹⁷-LYV (SEQ ID NO: 13804), APVRL (SEQ ID NO: 13591):KPLS-AA¹⁷-LYV (SEQ ID NO: 13804), APVAL (SEQ ID NO: 13584):KPLS-AA¹⁷-LYV (SEQ ID NO: 13804), APVDL (SEQ ID NO: 13585):KPLS-AA¹⁷-LYV (SEQ ID NO: 13804), VPTEL (SEQ ID NO: 13631):KPLS-AA¹⁷-LYV (SEQ ID NO: 13804), VPEKM (SEQ ID NO: 13616):KPLS-AA¹⁷-LYV (SEQ ID NO: 13804), APTKL (SEQ ID NO: 13579):KPLS-AA¹⁷-LYV (SEQ ID NO: 13804), APTQL (SEQ ID NO: 13582):KPLS-AA¹⁷-LYV (SEQ ID NO: 13804), VPTKL (SEQ ID NO: 13633):KPLS-AA¹⁷-LYV (SEQ ID NO: 13804), TPTKM (SEQ ID NO: 13598):KPLS-AA¹⁷-LYV (SEQ ID NO: 13804), VPARL (SEQ ID NO: 13611):KPLS-AA¹⁷-LYV (SEQ ID NO: 13804), VPTRL (SEQ ID NO: 13637):KPLS-AA¹⁷-LYV (SEQ ID NO: 13804), VPQAL (SEQ ID NO: 13620):KPLS-AA¹⁷-LYV (SEQ ID NO: 13804), VSQDL (SEQ ID NO: 13639):KPLS-AA¹⁷-LYV (SEQ ID NO: 13804), VPQDL (SEQ ID NO: 13621):KPLS-AA¹⁷-LYV (SEQ ID NO: 13804), VPTEE (SEQ ID NO: 13630):KPLS-AA¹⁷-LYV (SEQ ID NO: 13804), VPTGQ (SEQ ID NO: 13632):KPLS-AA¹⁷-LYV (SEQ ID NO: 13804), SRVHH (SEQ ID NO: 13592):KPLS-AA¹⁷-LYV (SEQ ID NO: 13804), TQVQL (SEQ ID NO: 13603):KPLS-AA¹⁷-LYV (SEQ ID NO: 13804), VPQEL (SEQ ID NO: 13622):EPLP-AA¹⁷-VYY (SEQ ID NO: 13802), VPQKM (SEQ ID NO: 13624):EPLP-AA¹⁷-VYY (SEQ ID NO: 13802), VPQKL (SEQ ID NO: 13623):EPLP-AA¹⁷-VYY (SEQ ID NO: 13802), VPQQL (SEQ ID NO: 13626):EPLP-AA¹⁷-VYY (SEQ ID NO: 13802), VPQRL (SEQ ID NO: 13627):EPLP-AA¹⁷-VYY (SEQ ID NO: 13802), VPQKT (SEQ ID NO: 13625):EPLP-AA¹⁷-VYY (SEQ ID NO: 13802), VPQDL (SEQ ID NO: 13621):EPLP-AA¹⁷-VYY (SEQ ID NO: 13802), VPTEL (SEQ ID NO: 13631):EPLP-AA¹⁷-VYY (SEQ ID NO: 13802), VPEKM (SEQ ID NO: 13616):EPLP-AA¹⁷-VYY (SEQ ID NO: 13802), APTKL (SEQ ID NO: 13579):EPLP-AA¹⁷-VYY (SEQ ID NO: 13802), APTQL (SEQ ID NO: 13582):EPLP-AA¹⁷-VYY (SEQ ID NO: 13802), VPTKL (SEQ ID NO: 13633):EPLP-AA¹⁷-VYY (SEQ ID NO: 13802), TPTKM (SEQ ID NO: 13598):EPLP-AA¹⁷-VYY (SEQ ID NO: 13802), VPARL (SEQ ID NO: 13611):EPLP-AA¹⁷-VYY (SEQ ID NO: 13802), VPTRL (SEQ ID NO: 13637):EPLP-AA¹⁷-VYY (SEQ ID NO: 13802), APVKT (SEQ ID NO: 13589):EPLP-AA¹⁷-VYY (SEQ ID NO: 13802), VSQDL (SEQ ID NO: 13639):EPLP-AA¹⁷-VYY (SEQ ID NO: 13802), VPTEE (SEQ ID NO: 13630):EPLP-AA¹⁷-VYY (SEQ ID NO: 13802), VPTGQ (SEQ ID NO: 13632):EPLP-AA¹⁷-VYY (SEQ ID NO: 13802), SRVHH (SEQ ID NO: 13592):EPLP-AA¹⁷-VYY (SEQ ID NO: 13802), TQVQL (SEQ ID NO: 13603):EPLP-AA¹⁷-VYY (SEQ ID NO: 13802), VSQEL (SEQ ID NO: 13640):EPLT-AA¹⁷-LYY (SEQ ID NO: 13803), VSQKM (SEQ ID NO: 13642):EPLT-AA¹⁷-LYY (SEQ ID NO: 13803), VSQKL (SEQ ID NO: 13641):EPLT-AA¹⁷-LYY (SEQ ID NO: 13803), VSQQL (SEQ ID NO: 13644):EPLT-AA¹⁷-LYY (SEQ ID NO: 13803), VSQRL (SEQ ID NO: 13645):EPLT-AA¹⁷-LYY (SEQ ID NO: 13803), VSQKT (SEQ ID NO: 13643):EPLT-AA¹⁷-LYY (SEQ ID NO: 13803), VSQAL (SEQ ID NO: 13638):EPLT-AA¹⁷-LYY (SEQ ID NO: 13803), VSQDL (SEQ ID NO: 13639):EPLT-AA¹⁷-LYY (SEQ ID NO: 13803), VPTEL (SEQ ID NO: 13631):EPLT-AA¹⁷-LYY (SEQ ID NO: 13803), VPEKM (SEQ ID NO: 13616):EPLT-AA¹⁷-LYY (SEQ ID NO: 13803), APTKL (SEQ ID NO: 13579):EPLT-AA¹⁷-LYY (SEQ ID NO: 13803), APTQL (SEQ ID NO: 13582):EPLT-AA¹⁷-LYY (SEQ ID NO: 13803), VPTKL (SEQ ID NO: 13633):EPLT-AA¹⁷-LYY (SEQ ID NO: 13803), TPTKM (SEQ ID NO: 13598):EPLT-AA¹⁷-LYY (SEQ ID NO: 13803), VPARL (SEQ ID NO: 13611):EPLT-AA¹⁷-LYY (SEQ ID NO: 13803), VPTRL (SEQ ID NO: 13637):EPLT-AA¹⁷-LYY (SEQ ID NO: 13803), APVKT (SEQ ID NO: 13589):EPLT-AA¹⁷-LYY (SEQ ID NO: 13803), VPQAL (SEQ ID NO: 13620):EPLT-AA¹⁷-LYY (SEQ ID NO: 13803), VPTEE (SEQ ID NO: 13630):EPLT-AA¹⁷-LYY (SEQ ID NO: 13803), VPTGQ (SEQ ID NO: 13632):EPLT-AA¹⁷-LYY (SEQ ID NO: 13803), SRVHH (SEQ ID NO: 13592):EPLT-AA¹⁷-LYY (SEQ ID NO: 13803), TQVQL (SEQ ID NO: 13603):EPLT-AA¹⁷-LYY (SEQ ID NO: 13803), VPQEL (SEQ ID NO: 13622):EPLT-AA¹⁷-LYY (SEQ ID NO: 13803), VPQKM (SEQ ID NO: 13624):EPLT-AA¹⁷-LYY (SEQ ID NO: 13803), VPQKL (SEQ ID NO: 13623):EPLT-AA¹⁷-LYY (SEQ ID NO: 13803), VPQQL (SEQ ID NO: 13626):EPLT-AA¹⁷-LYY (SEQ ID NO: 13803), VPQRL (SEQ ID NO: 13627):EPLT-AA¹⁷-LYY (SEQ ID NO: 13803), VPQKT (SEQ ID NO: 13625):EPLT-AA¹⁷-LYY (SEQ ID NO: 13803), VPQDL (SEQ ID NO: 13621):EPLT-AA¹⁷-LYY (SEQ ID NO: 13803), VPTGQ (SEQ ID NO: 13632):SNIT-AA¹⁷-QIM (SEQ ID NO: 13810), VPEKM (SEQ ID NO: 13616):SNIT-AA¹⁷-QIM (SEQ ID NO: 13810), APTKL (SEQ ID NO: 13579):SNIT-AA¹⁷-QIM (SEQ ID NO: 13810), APTQL (SEQ ID NO: 13582):SNIT-AA¹⁷-QIM (SEQ ID NO: 13810), TPTKM (SEQ ID NO: 13598):SNIT-AA¹⁷-QIM (SEQ ID NO: 13810), VPARL (SEQ ID NO: 13611):SNIT-AA¹⁷-QIM (SEQ ID NO: 13810), APVKT (SEQ ID NO: 13589):SNIT-AA¹⁷-QIM (SEQ ID NO: 13810), VPQAL (SEQ ID NO: 13620):SNIT-AA¹⁷-QIM (SEQ ID NO: 13810), VSQDL (SEQ ID NO: 13639):SNIT-AA¹⁷-QIM (SEQ ID NO: 13810), VPQDL (SEQ ID NO: 13621):SNIT-AA¹⁷-QIM (SEQ ID NO: 13810), SRVHH (SEQ ID NO: 13592):SNIT-AA¹⁷-QIM (SEQ ID NO: 13810), TQVQL (SEQ ID NO: 13603):SNIT-AA¹⁷-QIM (SEQ ID NO: 13810), SRVQL (SEQ ID NO: 13593):RSVK-AA¹⁷-AKV (SEQ ID NO: 13807), VPTEL (SEQ ID NO: 13631):RSVK-AA¹⁷-AKV (SEQ ID NO: 13807), VPEKM (SEQ ID NO: 13616):RSVK-AA¹⁷-AKV (SEQ ID NO: 13807), APTKL (SEQ ID NO: 13579):RSVK-AA¹⁷-AKV (SEQ ID NO: 13807), APTQL (SEQ ID NO: 13582):RSVK-AA¹⁷-AKV (SEQ ID NO: 13807), VPTKL (SEQ ID NO: 13633):RSVK-AA¹⁷-AKV (SEQ ID NO: 13807), TPTKM (SEQ ID NO: 13598):RSVK-AA¹⁷-AKV (SEQ ID NO: 13807), VPARL (SEQ ID NO: 13611):RSVK-AA¹⁷-AKV (SEQ ID NO: 13807), VPTRL (SEQ ID NO: 13637):RSVK-AA¹⁷-AKV (SEQ ID NO: 13807), APVKT (SEQ ID NO: 13589):RSVK-AA¹⁷-AKV (SEQ ID NO: 13807), VPQAL (SEQ ID NO: 13620):RSVK-AA¹⁷-AKV (SEQ ID NO: 13807), VSQDL (SEQ ID NO: 13639):RSVK-AA¹⁷-AKV (SEQ ID NO: 13807), VPQDL (SEQ ID NO: 13621):RSVK-AA¹⁷-AKV (SEQ ID NO: 13807), VPTEE (SEQ ID NO: 13630):RSVK-AA¹⁷-AKV (SEQ ID NO: 13807), VPTGQ (SEQ ID NO: 13632):RSVK-AA¹⁷-AKV (SEQ ID NO: 13807), TQVQL (SEQ ID NO: 13603):RSVK-AA¹⁷-AKV (SEQ ID NO: 13807), TQVHH (SEQ ID NO: 13602):RPVQ-AA¹⁷-RKI (SEQ ID NO: 13806), VPTEL (SEQ ID NO: 13631):RPVQ-AA¹⁷-RKI (SEQ ID NO: 13806), VPEKM (SEQ ID NO: 13616):RPVQ-AA¹⁷-RKI (SEQ ID NO: 13806), APTKL (SEQ ID NO: 13579):RPVQ-AA¹⁷-RKI (SEQ ID NO: 13806), APTQL (SEQ ID NO: 13582):RPVQ-AA¹⁷-RKI (SEQ ID NO: 13806), VPTKL (SEQ ID NO: 13633):RPVQ-AA¹⁷-RKI (SEQ ID NO: 13806), TPTKM (SEQ ID NO: 13598):RPVQ-AA¹⁷-RKI (SEQ ID NO: 13806), VPARL (SEQ ID NO: 13611):RPVQ-AA¹⁷-RKI (SEQ ID NO: 13806), VPTRL (SEQ ID NO: 13637):RPVQ-AA¹⁷-RKI (SEQ ID NO: 13806), APVKT (SEQ ID NO: 13589):RPVQ-AA¹⁷-RKI (SEQ ID NO: 13806), VPQAL (SEQ ID NO: 13620):RPVQ-AA¹⁷-RKI (SEQ ID NO: 13806), VSQDL (SEQ ID NO: 13639):RPVQ-AA¹⁷-RKI (SEQ ID NO: 13806), VPQDL (SEQ ID NO: 13621):RPVQ-AA¹⁷-RKI (SEQ ID NO: 13806), VPTEE (SEQ ID NO: 13630):RPVQ-AA¹⁷-RKI (SEQ ID NO: 13806), VPTGQ (SEQ ID NO: 13632):RPVQ-AA¹⁷-RKI (SEQ ID NO: 13806) and SRVHH (SEQ ID NO: 13592):RPVQ-AA¹⁷-RKI (SEQ ID NO: 13806); and wherein AA¹⁷ is selected from the group consisting of G, A, V, L, I, P, F, M, W, T and S (in particular is selected from the group consisting of M, I, L, V and T).

[0380] In particular, in certain embodiments, the pair PEP12:PEP7 is selected from the group consisting of GIPEPXX (SEQ ID NO: 13650):SAIS-AA¹⁷-LYL (SEQ ID NO: 13808), HVTKPTX (SEQ ID NO: 13653):SAIS-AA¹⁷-LYL (SEQ ID NO: 13808), YVPKPXX (SEQ ID NO: 13664):SAIS-AA¹⁷-LYL (SEQ ID NO: 13808), TVPKPXX (SEQ ID NO: 13663):SAIS-AA¹⁷-LYL (SEQ ID NO: 13808), AVPKAXX (SEQ ID NO: 13649):SAIS-AA¹⁷-LYL (SEQ ID NO: 13808), KVGKAXX (SEQ ID NO: 13656):SAIS-AA¹⁷-LYL (SEQ ID NO: 13808), KASKAXX (SEQ ID NO: 13654):SAIS-AA¹⁷-LYL (SEQ ID NO: 13808), GSAGPXX (SEQ ID NO: 13651):SAIS-AA¹⁷-LYL (SEQ ID NO: 13808), AAPASXX (SEQ ID NO: 13646):SAIS-AA¹⁷-LYL (SEQ ID NO: 13808), STPPTXX (SEQ ID NO: 13662):SAIS-AA¹⁷-LYL (SEQ ID NO: 13808), HVPKPXX (SEQ ID NO: 13652):SAIS-AA¹⁷-LYL (SEQ ID NO: 13808), RVPSTXX (SEQ ID NO: 13659):SAIS-AA¹⁷-LYL (SEQ ID NO: 13808), ASAAPXX (SEQ ID NO: 13647):SAIS-AA¹⁷-LYL (SEQ ID NO: 13808), ASASPXX (SEQ ID NO: 13648):SAIS-AA¹⁷-LYL (SEQ ID NO: 13808), SSVKXQP (SEQ ID NO: 13661):SAIS-AA¹⁷-LYL (SEQ ID NO: 13808), RNVQXRP (SEQ ID NO: 13658):SAIS-AA¹⁷-LYL (SEQ ID NO: 13808), KIPKAXX (SEQ ID NO: 13655):SSLS-AA¹⁷-LFF (SEQ ID NO: 13815), SIPKAXX (SEQ ID NO: 13660):SSLS-AA¹⁷-LFF (SEQ ID NO: 13815), HVTKPTX (SEQ ID NO: 13653):SSLS-AA¹⁷-LFF (SEQ ID NO: 13815), YVPKPXX (SEQ ID NO: 13664):SSLS-AA¹⁷-LFF (SEQ ID NO: 13815), TVPKPXX (SEQ ID NO: 13663):SSLS-AA¹⁷-LFF (SEQ ID NO: 13815), AVPKAXX (SEQ ID NO: 13649):SSLS-AA¹⁷-LFF (SEQ ID NO: 13815), KVGKAXX (SEQ ID NO: 13656):SSLS-AA¹⁷-LFF (SEQ ID NO: 13815), KASKAXX (SEQ ID NO: 13654):SSLS-AA¹⁷-LFF (SEQ ID NO: 13815), GSAGPXX (SEQ ID NO: 13651):SSLS-AA¹⁷-LFF (SEQ ID NO: 13815), AAPASXX (SEQ ID NO: 13646):SSLS-AA¹⁷-LFF (SEQ ID NO: 13815), STPPTXX (SEQ ID NO: 13662):SSLS-AA¹⁷-LFF (SEQ ID NO: 13815), HVPKPXX (SEQ ID NO: 13652):SSLS-AA¹⁷-LFF (SEQ ID NO: 13815), RVPSTXX (SEQ ID NO: 13659):SSLS-AA¹⁷-LFF (SEQ ID NO: 13815), ASAAPXX (SEQ ID NO: 13647):SSLS-AA¹⁷-LFF (SEQ ID NO: 13815), ASASPXX (SEQ ID NO: 13648):SSLS-AA¹⁷-LFF (SEQ ID NO: 13815), NDEGLEX (SEQ ID NO: 13657):SSLS-AA¹⁷-LFF (SEQ ID NO: 13815), SSVKXQP (SEQ ID NO: 13661):SSLS-AA¹⁷-LFF (SEQ ID NO: 13815), RNVQXRP (SEQ ID NO: 13658):SSLS-AA¹⁷-LFF (SEQ ID NO: 13815), KIPKAXX (SEQ ID NO: 13655):NAIS-AA¹⁷-LYF (SEQ ID NO: 13805), GIPEPXX (SEQ ID NO: 13650):NAIS-AA¹⁷-LYF (SEQ ID NO: 13805), SIPKAXX (SEQ ID NO: 13660):NAIS-AA¹⁷-LYF (SEQ ID NO: 13805), AVPKAXX (SEQ ID NO: 13649):NAIS-AA¹⁷-LYF (SEQ ID NO: 13805), KVGKAXX (SEQ ID NO: 13656):NAIS-AA¹⁷-LYF (SEQ ID NO: 13805), KASKAXX (SEQ ID NO: 13654):NAIS-AA¹⁷-LYF (SEQ ID NO: 13805), GSAGPXX (SEQ ID NO: 13651):NAIS-AA¹⁷-LYF (SEQ ID NO: 13805), AAPASXX (SEQ ID NO: 13646):NAIS-AA¹⁷-LYF (SEQ ID NO: 13805), STPPTXX (SEQ ID NO: 13662):NAIS-AA¹⁷-LYF (SEQ ID NO: 13805), RVPSTXX (SEQ ID NO: 13659):NAIS-AA¹⁷-LYF (SEQ ID NO: 13805), ASAAPXX (SEQ ID NO: 13647):NAIS-AA¹⁷-LYF (SEQ ID NO: 13805), ASASPXX (SEQ ID NO: 13648):NAIS-AA¹⁷-LYF (SEQ ID NO: 13805), NDEGLEX (SEQ ID NO: 13657):NAIS-AA¹⁷-LYF (SEQ ID NO: 13805), SSVKXQP (SEQ ID NO: 13661):NAIS-AA¹⁷-LYF (SEQ ID NO: 13805), RNVQXRP (SEQ ID NO: 13658):NAIS-AA¹⁷-LYF (SEQ ID NO: 13805), KIPKAXX (SEQ ID NO: 13655):SATS-AA¹⁷-LYY (SEQ ID NO: 13809), GIPEPXX (SEQ ID NO: 13650):SATS-AA¹⁷-LYY (SEQ ID NO: 13809), SIPKAXX (SEQ ID NO: 13660):SATS-AA¹⁷-LYY (SEQ ID NO: 13809), HVTKPTX (SEQ ID NO: 13653):SATS-AA¹⁷-LYY (SEQ ID NO: 13809), YVPKPXX (SEQ ID NO: 13664):SATS-AA¹⁷-LYY (SEQ ID NO: 13809), TVPKPXX (SEQ ID NO: 13663):SATS-AA¹⁷-LYY (SEQ ID NO: 13809), KVGKAXX (SEQ ID NO: 13656):SATS-AA¹⁷-LYY (SEQ ID NO: 13809), KASKAXX (SEQ ID NO: 13654):SATS-AA¹⁷-LYY (SEQ ID NO: 13809), GSAGPXX (SEQ ID NO: 13651):SATS-AA¹⁷-LYY (SEQ ID NO: 13809), AAPASXX (SEQ ID NO: 13646):SATS-AA¹⁷-LYY (SEQ ID NO: 13809), STPPTXX (SEQ ID NO: 13662):SATS-AA¹⁷-LYY (SEQ ID NO: 13809), HVPKPXX (SEQ ID NO: 13652):SATS-AA¹⁷-LYY (SEQ ID NO: 13809), RVPSTXX (SEQ ID NO: 13659):SATS-AA¹⁷-LYY (SEQ ID NO: 13809), ASAAPXX (SEQ ID NO: 13647):SATS-AA¹⁷-LYY (SEQ ID NO: 13809), ASASPXX (SEQ ID NO: 13648):SATS-AA¹⁷-LYY (SEQ ID NO: 13809), NDEGLEX (SEQ ID NO: 13657):SATS-AA¹⁷-LYY (SEQ ID NO: 13809), SSVKXQP (SEQ ID NO: 13661):SATS-AA¹⁷-LYY (SEQ ID NO: 13809), RNVQXRP (SEQ ID NO: 13658):SATS-AA¹⁷-LYY (SEQ ID NO: 13809), KIPKAXX (SEQ ID NO: 13655):SPIS-AA¹⁷-LYK (SEQ ID NO: 13814), GIPEPXX (SEQ ID NO: 13650):SPIS-AA¹⁷-LYK (SEQ ID NO: 13814), SIPKAXX (SEQ ID NO: 13660):SPIS-AA¹⁷-LYK (SEQ ID NO: 13814), HVTKPTX (SEQ ID NO: 13653):SPIS-AA¹⁷-LYK (SEQ ID NO: 13814), YVPKPXX (SEQ ID NO: 13664):SPIS-AA¹⁷-LYK (SEQ ID NO: 13814), TVPKPXX (SEQ ID NO: 13663):SPIS-AA¹⁷-LYK (SEQ ID NO: 13814), AVPKAXX (SEQ ID NO: 13649):SPIS-AA¹⁷-LYK (SEQ ID NO: 13814), KASKAXX (SEQ ID NO: 13654):SPIS-AA¹⁷-LYK (SEQ ID NO: 13814), GSAGPXX (SEQ ID NO: 13651):SPIS-AA¹⁷-LYK (SEQ ID NO: 13814), AAPASXX (SEQ ID NO: 13646):SPIS-AA¹⁷-LYK (SEQ ID NO: 13814), STPPTXX (SEQ ID NO: 13662):SPIS-AA¹⁷-LYK (SEQ ID NO: 13814), HVPKPXX (SEQ ID NO: 13652):SPIS-AA¹⁷-LYK (SEQ ID NO: 13814), RVPSTXX (SEQ ID NO: 13659):SPIS-AA¹⁷-LYK (SEQ ID NO: 13814), ASAAPXX (SEQ ID NO: 13647):SPIS-AA¹⁷-LYK (SEQ ID NO: 13814), ASASPXX (SEQ ID NO: 13648):SPIS-AA¹⁷-LYK (SEQ ID NO: 13814), SSVKXQP (SEQ ID NO: 13661):SPIS-AA¹⁷-LYK (SEQ ID NO: 13814), RNVQXRP (SEQ ID NO: 13658):SPIS-AA¹⁷-LYK (SEQ ID NO: 13814), KIPKAXX (SEQ ID NO: 13655):EPIS-AA¹⁷-LYL (SEQ ID NO: 13801), GIPEPXX (SEQ ID NO: 13650):EPIS-AA¹⁷-LYL (SEQ ID NO: 13801), SIPKAXX (SEQ ID NO: 13660):EPIS-AA¹⁷-LYL (SEQ ID NO: 13801), HVTKPTX (SEQ ID NO: 13653):EPIS-AA¹⁷-LYL (SEQ ID NO: 13801), YVPKPXX (SEQ ID NO: 13664):EPIS-AA¹⁷-LYL (SEQ ID NO: 13801), TVPKPXX (SEQ ID NO: 13663):EPIS-AA¹⁷-LYL (SEQ ID NO: 13801), AVPKAXX (SEQ ID NO: 13649):EPIS-AA¹⁷-LYL (SEQ ID NO: 13801), KVGKAXX (SEQ ID NO: 13656):EPIS-AA¹⁷-LYL (SEQ ID NO: 13801), GSAGPXX (SEQ ID NO: 13651):EPIS-AA¹⁷-LYL (SEQ ID NO: 13801), AAPASXX (SEQ ID NO: 13646):EPIS-AA¹⁷-LYL (SEQ ID NO: 13801), STPPTXX (SEQ ID NO: 13662):EPIS-AA¹⁷-LYL (SEQ ID NO: 13801), HVPKPXX (SEQ ID NO: 13652):EPIS-AA¹⁷-LYL (SEQ ID NO: 13801), RVPSTXX (SEQ ID NO: 13659):EPIS-AA¹⁷-LYL (SEQ ID NO: 13801), ASAAPXX (SEQ ID NO: 13647):EPIS-AA¹⁷-LYL (SEQ ID NO: 13801), ASASPXX (SEQ ID NO: 13648):EPIS-AA¹⁷-LYL (SEQ ID NO: 13801), SSVKXQP (SEQ ID NO: 13661):EPIS-AA¹⁷-LYL (SEQ ID NO: 13801), RNVQXRP (SEQ ID NO: 13658):EPIS-AA¹⁷-LYL (SEQ ID NO: 13801), KIPKAXX (SEQ ID NO: 13655):SPIN-AA¹⁷-LYF (SEQ ID NO: 13811), GIPEPXX (SEQ ID NO: 13650):SPIN-AA¹⁷-LYF (SEQ ID NO: 13811), SIPKAXX (SEQ ID NO: 13660):SPIN-AA¹⁷-LYF (SEQ ID NO: 13811), HVTKPTX (SEQ ID NO: 13653):SPIN-AA¹⁷-LYF (SEQ ID NO: 13811), YVPKPXX (SEQ ID NO: 13664):SPIN-AA¹⁷-LYF (SEQ ID NO: 13811), TVPKPXX (SEQ ID NO: 13663):SPIN-AA¹⁷-LYF (SEQ ID NO: 13811), AVPKAXX (SEQ ID NO: 13649):SPIN-AA¹⁷-LYF (SEQ ID NO: 13811), KVGKAXX (SEQ ID NO: 13656):SPIN-AA¹⁷-LYF (SEQ ID NO: 13811), KASKAXX (SEQ ID NO: 13654):SPIN-AA¹⁷-LYF (SEQ ID NO: 13811), AAPASXX (SEQ ID NO: 13646):SPIN-AA¹⁷-LYF (SEQ ID NO: 13811), STPPTXX (SEQ ID NO: 13662):SPIN-AA¹⁷-LYF (SEQ ID NO: 13811), HVPKPXX (SEQ ID NO: 13652):SPIN-AA¹⁷-LYF (SEQ ID NO: 13811), RVPSTXX (SEQ ID NO: 13659):SPIN-AA¹⁷-LYF (SEQ ID NO: 13811), ASAAPXX (SEQ ID NO: 13647):SPIN-AA¹⁷-LYF (SEQ ID NO: 13811), ASASPXX (SEQ ID NO: 13648):SPIN-AA¹⁷-LYF (SEQ ID NO: 13811), NDEGLEX (SEQ ID NO: 13657):SPIN-AA¹⁷-LYF (SEQ ID NO: 13811), SSVKXQP (SEQ ID NO: 13661):SPIN-AA¹⁷-LYF (SEQ ID NO: 13811), RNVQXRP (SEQ ID NO: 13658):SPIN-AA¹⁷-LYF (SEQ ID NO: 13811), KIPKAXX (SEQ ID NO: 13655):SPIS-AA¹⁷-LYI (SEQ ID NO: 13813), GIPEPXX (SEQ ID NO: 13650):SPIS-AA¹⁷-LYI (SEQ ID NO: 13813), SIPKAXX (SEQ ID NO: 13660):SPIS-AA¹⁷-LYI (SEQ ID NO: 13813), HVTKPTX (SEQ ID NO: 13653):SPIS-AA¹⁷-LYI (SEQ ID NO: 13813), YVPKPXX (SEQ ID NO: 13664):SPIS-AA¹⁷-LYI (SEQ ID NO: 13813), TVPKPXX (SEQ ID NO: 13663):SPIS-AA¹⁷-LYI (SEQ ID NO: 13813), AVPKAXX (SEQ ID NO: 13649):SPIS-AA¹⁷-LYI (SEQ ID NO: 13813), KVGKAXX (SEQ ID NO: 13656):SPIS-AA¹⁷-LYI (SEQ ID NO: 13813), KASKAXX (SEQ ID NO: 13654):SPIS-AA¹⁷-LYI (SEQ ID NO: 13813), GSAGPXX (SEQ ID NO: 13651):SPIS-AA¹⁷-LYI (SEQ ID NO: 13813), STPPTXX (SEQ ID NO: 13662):SPIS-AA¹⁷-LYI (SEQ ID NO: 13813), HVPKPXX (SEQ ID NO: 13652):SPIS-AA¹⁷-LYI (SEQ ID NO: 13813), RVPSTXX (SEQ ID NO: 13659):SPIS-AA¹⁷-LYI (SEQ ID NO: 13813), ASAAPXX (SEQ ID NO: 13647):SPIS-AA¹⁷-LYI (SEQ ID NO: 13813), ASASPXX (SEQ ID NO: 13648):SPIS-AA¹⁷-LYI (SEQ ID NO: 13813), NDEGLEX (SEQ ID NO: 13657):SPIS-AA¹⁷-LYI (SEQ ID NO: 13813), SSVKXQP (SEQ ID NO: 13661):SPIS-AA¹⁷-LYI (SEQ ID NO: 13813), RNVQXRP (SEQ ID NO: 13658):SPIS-AA¹⁷-LYI (SEQ ID NO: 13813), KIPKAXX (SEQ ID NO: 13655):SPIS-AA¹⁷-LFI (SEQ ID NO: 13812), GIPEPXX (SEQ ID NO: 13650):SPIS-AA¹⁷-LFI (SEQ ID NO: 13812), SIPKAXX (SEQ ID NO: 13660):SPIS-AA¹⁷-LFI (SEQ ID NO: 13812), HVTKPTX (SEQ ID NO: 13653):SPIS-AA¹⁷-LFI (SEQ ID NO: 13812), YVPKPXX (SEQ ID NO: 13664):SPIS-AA¹⁷-LFI (SEQ ID NO: 13812), TVPKPXX (SEQ ID NO: 13663):SPIS-AA¹⁷-LFI (SEQ ID NO: 13812), AVPKAXX (SEQ ID NO: 13649):SPIS-AA¹⁷-LFI (SEQ ID NO: 13812), KVGKAXX (SEQ ID NO: 13656):SPIS-AA¹⁷-LFI (SEQ ID NO: 13812), KASKAXX (SEQ ID NO: 13654):SPIS-AA¹⁷-LFI (SEQ ID NO: 13812), GSAGPXX (SEQ ID NO: 13651):SPIS-AA¹⁷-LFI (SEQ ID NO: 13812), AAPASXX (SEQ ID NO: 13646):SPIS-AA¹⁷-LFI (SEQ ID NO: 13812), HVPKPXX (SEQ ID NO: 13652):SPIS-AA¹⁷-LFI (SEQ ID NO: 13812), RVPSTXX (SEQ ID NO: 13659):SPIS-AA¹⁷-LFI (SEQ ID NO: 13812), ASAAPXX (SEQ ID NO: 13647):SPIS-AA¹⁷-LFI (SEQ ID NO: 13812), ASASPXX (SEQ ID NO: 13648):SPIS-AA¹⁷-LFI (SEQ ID NO: 13812), SSVKXQP (SEQ ID NO: 13661):SPIS-AA¹⁷-LFI (SEQ ID NO: 13812), RNVQXRP (SEQ ID NO: 13658):SPIS-AA¹⁷-LFI (SEQ ID NO: 13812), KIPKAXX (SEQ ID NO: 13655):KPLS-AA¹⁷-LYV (SEQ ID NO: 13804), GIPEPXX (SEQ ID NO: 13650):KPLS-AA¹⁷-LYV (SEQ ID NO: 13804), SIPKAXX (SEQ ID NO: 13660):KPLS-AA¹⁷-LYV (SEQ ID NO: 13804), HVTKPTX (SEQ ID NO: 13653):KPLS-AA¹⁷-LYV (SEQ ID NO: 13804), YVPKPXX (SEQ ID NO: 13664):KPLS-AA¹⁷-LYV (SEQ ID NO: 13804), TVPKPXX (SEQ ID NO: 13663):KPLS-AA¹⁷-LYV (SEQ ID NO: 13804), AVPKAXX (SEQ ID NO: 13649):KPLS-AA¹⁷-LYV (SEQ ID NO: 13804), KVGKAXX (SEQ ID NO: 13656):KPLS-AA¹⁷-LYV (SEQ ID NO: 13804), KASKAXX (SEQ ID NO: 13654):KPLS-AA¹⁷-LYV (SEQ ID NO: 13804), GSAGPXX (SEQ ID NO: 13651):KPLS-AA¹⁷-LYV (SEQ ID NO: 13804), AAPASXX (SEQ ID NO: 13646):KPLS-AA¹⁷-LYV (SEQ ID NO: 13804), STPPTXX (SEQ ID NO: 13662):KPLS-AA¹⁷-LYV (SEQ ID NO: 13804), HVPKPXX (SEQ ID NO: 13652):KPLS-AA¹⁷-LYV (SEQ ID NO: 13804), ASAAPXX (SEQ ID NO: 13647):KPLS-AA¹⁷-LYV (SEQ ID NO: 13804), ASASPXX (SEQ ID NO: 13648):KPLS-AA¹⁷-LYV (SEQ ID NO: 13804), NDEGLEX (SEQ ID NO: 13657):KPLS-AA¹⁷-LYV (SEQ ID NO: 13804), SSVKXQP (SEQ ID NO: 13661):KPLS-AA¹⁷-LYV (SEQ ID NO: 13804), RNVQXRP (SEQ ID NO: 13658):KPLS-AA¹⁷-LYV (SEQ ID NO: 13804), KIPKAXX (SEQ ID NO: 13655):EPLP-AA¹⁷-VYY (SEQ ID NO: 13802), GIPEPXX (SEQ ID NO: 13650):EPLP-AA¹⁷-VYY (SEQ ID NO: 13802), SIPKAXX (SEQ ID NO: 13660):EPLP-AA¹⁷-VYY (SEQ ID NO: 13802), HVTKPTX (SEQ ID NO: 13653):EPLP-AA¹⁷-VYY (SEQ ID NO: 13802), YVPKPXX (SEQ ID NO: 13664):EPLP-AA¹⁷-VYY (SEQ ID NO: 13802), TVPKPXX (SEQ ID NO: 13663):EPLP-AA¹⁷-VYY (SEQ ID NO: 13802), AVPKAXX (SEQ ID NO: 13649):EPLP-AA¹⁷-VYY (SEQ ID NO: 13802), KVGKAXX (SEQ ID NO: 13656):EPLP-AA¹⁷-VYY (SEQ ID NO: 13802), KASKAXX (SEQ ID NO: 13654):EPLP-AA¹⁷-VYY (SEQ ID NO: 13802), GSAGPXX (SEQ ID NO: 13651):EPLP-AA¹⁷-VYY (SEQ ID NO: 13802), AAPASXX (SEQ ID NO: 13646):EPLP-AA¹⁷-VYY (SEQ ID NO: 13802), STPPTXX (SEQ ID NO: 13662):EPLP-AA¹⁷-VYY (SEQ ID NO: 13802), HVPKPXX (SEQ ID NO: 13652):EPLP-AA¹⁷-VYY (SEQ ID NO: 13802), RVPSTXX (SEQ ID NO: 13659):EPLP-AA¹⁷-VYY (SEQ ID NO: 13802), ASASPXX (SEQ ID NO: 13648):EPLP-AA¹⁷-VYY (SEQ ID NO: 13802), NDEGLEX (SEQ ID NO: 13657):EPLP-AA¹⁷-VYY (SEQ ID NO: 13802), SSVKXQP (SEQ ID NO: 13661):EPLP-AA¹⁷-VYY (SEQ ID NO: 13802), RNVQXRP (SEQ ID NO: 13658):EPLP-AA¹⁷-VYY (SEQ ID NO: 13802), KIPKAXX (SEQ ID NO: 13655):EPLT-AA¹⁷-LYY (SEQ ID NO: 13803), GIPEPXX (SEQ ID NO: 13650):EPLT-AA¹⁷-LYY (SEQ ID NO: 13803), SIPKAXX (SEQ ID NO: 13660):EPLT-AA¹⁷-LYY (SEQ ID NO: 13803), HVTKPTX (SEQ ID NO: 13653):EPLT-AA¹⁷-LYY (SEQ ID NO: 13803), YVPKPXX (SEQ ID NO: 13664):EPLT-AA¹⁷-LYY (SEQ ID NO: 13803), TVPKPXX (SEQ ID NO: 13663):EPLT-AA¹⁷-LYY (SEQ ID NO: 13803), AVPKAXX (SEQ ID NO: 13649):EPLT-AA¹⁷-LYY (SEQ ID NO: 13803), KVGKAXX (SEQ ID NO: 13656):EPLT-AA¹⁷-LYY (SEQ ID NO: 13803), KASKAXX (SEQ ID NO: 13654):EPLT-AA¹⁷-LYY (SEQ ID NO: 13803), GSAGPXX (SEQ ID NO: 13651):EPLT-AA¹⁷-LYY (SEQ ID NO: 13803), AAPASXX (SEQ ID NO: 13646):EPLT-AA¹⁷-LYY (SEQ ID NO: 13803), STPPTXX (SEQ ID NO: 13662):EPLT-AA¹⁷-LYY (SEQ ID NO: 13803), HVPKPXX (SEQ ID NO: 13652):EPLT-AA¹⁷-LYY (SEQ ID NO: 13803), RVPSTXX (SEQ ID NO: 13659):EPLT-AA¹⁷-LYY (SEQ ID NO: 13803), ASAAPXX (SEQ ID NO: 13647):EPLT-AA¹⁷-LYY (SEQ ID NO: 13803), ASASPXX (SEQ ID NO: 13648):EPLT-AA¹⁷-LYY (SEQ ID NO: 13803), NDEGLEX (SEQ ID NO: 13657):EPLT-AA¹⁷-LYY (SEQ ID NO: 13803), SSVKXQP (SEQ ID NO: 13661):EPLT-AA¹⁷-LYY (SEQ ID NO: 13803), RNVQXRP (SEQ ID NO: 13658):EPLT-AA¹⁷-LYY (SEQ ID NO: 13803), NDEGLEX (SEQ ID NO: 13657):SNIT-AA¹⁷-QIM (SEQ ID NO: 13810), GIPEPXX (SEQ ID NO: 13650):SNIT-AA¹⁷-QIM (SEQ ID NO: 13810), HVTKPTX (SEQ ID NO: 13653):SNIT-AA¹⁷-QIM (SEQ ID NO: 13810), YVPKPXX (SEQ ID NO: 13664):SNIT-AA¹⁷-QIM (SEQ ID NO: 13810), TVPKPXX (SEQ ID NO: 13663):SNIT-AA¹⁷-QIM (SEQ ID NO: 13810), AVPKAXX (SEQ ID NO: 13649):SNIT-AA¹⁷-QIM (SEQ ID NO: 13810), GSAGPXX (SEQ ID NO: 13651):SNIT-AA¹⁷-QIM (SEQ ID NO: 13810), AAPASXX (SEQ ID NO: 13646):SNIT-AA¹⁷-QIM (SEQ ID NO: 13810), HVPKPXX (SEQ ID NO: 13652):SNIT-AA¹⁷-QIM (SEQ ID NO: 13810), RVPSTXX (SEQ ID NO: 13659):SNIT-AA¹⁷-QIM (SEQ ID NO: 13810), ASAAPXX (SEQ ID NO: 13647):SNIT-AA¹⁷-QIM (SEQ ID NO: 13810), ASASPXX (SEQ ID NO: 13648):SNIT-AA¹⁷-QIM (SEQ ID NO: 13810), SSVKXQP (SEQ ID NO: 13661):SNIT-AA¹⁷-QIM (SEQ ID NO: 13810), RNVQXRP (SEQ ID NO: 13658):SNIT-AA¹⁷-QIM (SEQ ID NO: 13810), RNVQXRP (SEQ ID NO: 13658):RSVK-AA¹⁷-AKV (SEQ ID NO: 13807), KIPKAXX (SEQ ID NO: 13655):RSVK-AA¹⁷-AKV (SEQ ID NO: 13807), GIPEPXX (SEQ ID NO: 13650):RSVK-AA¹⁷-AKV (SEQ ID NO: 13807), SIPKAXX (SEQ ID NO: 13660):RSVK-AA¹⁷-AKV (SEQ ID NO: 13807), HVTKPTX (SEQ ID NO: 13653):RSVK-AA¹⁷-AKV (SEQ ID NO: 13807), YVPKPXX (SEQ ID NO: 13664):RSVK-AA¹⁷-AKV (SEQ ID NO: 13807), TVPKPXX (SEQ ID NO: 13663):RSVK-AA¹⁷-AKV (SEQ ID NO: 13807), AVPKAXX (SEQ ID NO: 13649):RSVK-AA¹⁷-AKV (SEQ ID NO: 13807), KVGKAXX (SEQ ID NO: 13656):RSVK-AA¹⁷-AKV (SEQ ID NO: 13807), KASKAXX (SEQ ID NO: 13654):RSVK-AA¹⁷-AKV (SEQ ID NO: 13807), GSAGPXX (SEQ ID NO: 13651):RSVK-AA¹⁷-AKV (SEQ ID NO: 13807), AAPASXX (SEQ ID NO: 13646):RSVK-AA¹⁷-AKV (SEQ ID NO: 13807), STPPTXX (SEQ ID NO: 13662):RSVK-AA¹⁷-AKV (SEQ ID NO: 13807), HVPKPXX (SEQ ID NO: 13652):RSVK-AA¹⁷-AKV (SEQ ID NO: 13807), RVPSTXX (SEQ ID NO: 13659):RSVK-AA¹⁷-AKV (SEQ ID NO: 13807), ASAAPXX (SEQ ID NO: 13647):RSVK-AA¹⁷-AKV (SEQ ID NO: 13807), ASASPXX (SEQ ID NO: 13648):RSVK-AA¹⁷-AKV (SEQ ID NO: 13807), NDEGLEX (SEQ ID NO: 13657):RSVK-AA¹⁷-AKV (SEQ ID NO: 13807), SSVKXQP (SEQ ID NO: 13661):RPVQ-AA¹⁷-RKI (SEQ ID NO: 13806), KIPKAXX (SEQ ID NO: 13655):RPVQ-AA¹⁷-RKI (SEQ ID NO: 13806), GIPEPXX (SEQ ID NO: 13650):RPVQ-AA¹⁷-RKI (SEQ ID NO: 13806), SIPKAXX (SEQ ID NO: 13660):RPVQ-AA¹⁷-RKI (SEQ ID NO: 13806), HVTKPTX (SEQ ID NO: 13653):RPVQ-AA¹⁷-RKI (SEQ ID NO: 13806), YVPKPXX (SEQ ID NO: 13664):RPVQ-AA¹⁷-RKI (SEQ ID NO: 13806), TVPKPXX (SEQ ID NO: 13663):RPVQ-AA¹⁷-RKI (SEQ ID NO: 13806), AVPKAXX (SEQ ID NO: 13649):RPVQ-AA¹⁷-RKI (SEQ ID NO: 13806), KVGKAXX (SEQ ID NO: 13656):RPVQ-AA¹⁷-RKI (SEQ ID NO: 13806), KASKAXX (SEQ ID NO: 13654):RPVQ-AA¹⁷-RKI (SEQ ID NO: 13806), GSAGPXX (SEQ ID NO: 13651):RPVQ-AA¹⁷-RKI (SEQ ID NO: 13806), AAPASXX (SEQ ID NO: 13646):RPVQ-AA¹⁷-RKI (SEQ ID NO: 13806), STPPTXX (SEQ ID NO: 13662):RPVQ-AA¹⁷-RKI (SEQ ID NO: 13806), HVPKPXX (SEQ ID NO: 13652):RPVQ-AA¹⁷-RKI (SEQ ID NO: 13806), RVPSTXX (SEQ ID NO: 13659):RPVQ-AA¹⁷-RKI (SEQ ID NO: 13806), ASAAPXX (SEQ ID NO: 13647):RPVQ-AA¹⁷-RKI (SEQ ID NO: 13806), ASASPXX (SEQ ID NO: 13648):RPVQ-AA¹⁷-RKI (SEQ ID NO: 13806) and NDEGLEX (SEQ ID NO: 13657):RPVQ-AA¹⁷-RKI (SEQ ID NO: 13806); and wherein AA¹⁷ is selected from the group consisting of G, A, V, L, I, P, F, M, W, T and S (in particular is selected from the group consisting of M, I, L, V and T).

[0381] In particular, in certain embodiments, the pair PEP12:PEP9 is selected from the group consisting of GIPEPXXVPTKM (SEQ ID NO: 13703):SAIS-AA¹⁷-LYL (SEQ ID NO: 13808), HVTKPTXVPTKL (SEQ ID NO: 13729):SAIS-AA¹⁷-LYL (SEQ ID NO: 13808), YVPKPXXVPTKL (SEQ ID NO: 13799):SAIS-AA¹⁷-LYL (SEQ ID NO: 13808), TVPKPXXVPTQL (SEQ ID NO: 13791):SAIS-AA¹⁷-LYL (SEQ ID NO: 13808), AVPKAXXVPTKL (SEQ ID NO: 13695):SAIS-AA¹⁷-LYL (SEQ ID NO: 13808), KVGKAXXVPTKL (SEQ ID NO: 13753):SAIS-AA¹⁷-LYL (SEQ ID NO: 13808), KASKAXXVPTKL (SEQ ID NO: 13737):SAIS-AA¹⁷-LYL (SEQ ID NO: 13808), GSAGPXXVPTKM (SEQ ID NO: 13711):SAIS-AA¹⁷-LYL (SEQ ID NO: 13808), AAPASXXVPTRL (SEQ ID NO: 13671):SAIS-AA¹⁷-LYL (SEQ ID NO: 13808), STPPTXXVPTRL (SEQ ID NO: 13783):SAIS-AA¹⁷-LYL (SEQ ID NO: 13808), HVPKPXXVPTKL (SEQ ID NO: 13719):SAIS-AA¹⁷-LYL (SEQ ID NO: 13808), RVPSTXXVPTKT (SEQ ID NO: 13765):SAIS-AA¹⁷-LYL (SEQ ID NO: 13808), ASAAPXXVPTAL (SEQ ID NO: 13679):SAIS-AA¹⁷-LYL (SEQ ID NO: 13808), ASASPXXVPTDL (SEQ ID NO: 13687):SAIS-AA¹⁷-LYL (SEQ ID NO: 13808), GIPEPXXVPEKM (SEQ ID NO: 13701):SAIS-AA¹⁷-LYL (SEQ ID NO: 13808), HVTKPTXAPTKL (SEQ ID NO: 13721):SAIS-AA¹⁷-LYL (SEQ ID NO: 13808), YVPKPXXAPTKL (SEQ ID NO: 13793):SAIS-AA¹⁷-LYL (SEQ ID NO: 13808), TVPKPXXAPTQL (SEQ ID NO: 13785):SAIS-AA¹⁷-LYL (SEQ ID NO: 13808), AVPKAXXAPTKL (SEQ ID NO: 13689):SAIS-AA¹⁷-LYL (SEQ ID NO: 13808), GSAGPXXTPTKM (SEQ ID NO: 13707):SAIS-AA¹⁷-LYL (SEQ ID NO: 13808), AAPASXXVPARL (SEQ ID NO: 13668):SAIS-AA¹⁷-LYL (SEQ ID NO: 13808), HVPKPXXAPTKL (SEQ ID NO: 13713):SAIS-AA¹⁷-LYL (SEQ ID NO: 13808), RVPSTXXAPVKT (SEQ ID NO: 13760):SAIS-AA¹⁷-LYL (SEQ ID NO: 13808), ASAAPXXVPQAL (SEQ ID NO: 13678):SAIS-AA¹⁷-LYL (SEQ ID NO: 13808), ASASPXXVSQDL (SEQ ID NO: 13688):SAIS-AA¹⁷-LYL (SEQ ID NO: 13808), ASASPXXVPQDL (SEQ ID NO: 13686):SAIS-AA¹⁷-LYL (SEQ ID NO: 13808), SSVKXQPSRVHH (SEQ ID NO: 13775):SAIS-AA¹⁷-LYL (SEQ ID NO: 13808), RNVQXRPTQVQL (SEQ ID NO: 13758):SAIS-AA¹⁷-LYL (SEQ ID NO: 13808), KIPKAXXVPEEL (SEQ ID NO: 13743):SSLS-AA¹⁷-LFF (SEQ ID NO: 13815), SIPKAXXVPEEL (SEQ ID NO: 13771):SSLS-AA¹⁷-LFF (SEQ ID NO: 13815), HVTKPTXVPEKL (SEQ ID NO: 13727):SSLS-AA¹⁷-LFF (SEQ ID NO: 13815), YVPKPXXVPEKL (SEQ ID NO: 13797):SSLS-AA¹⁷-LFF (SEQ ID NO: 13815), TVPKPXXVPEQL (SEQ ID NO: 13789):SSLS-AA¹⁷-LFF (SEQ ID NO: 13815), AVPKAXXVPEKL (SEQ ID NO: 13693):SSLS-AA¹⁷-LFF (SEQ ID NO: 13815), KVGKAXXVPEKL (SEQ ID NO: 13751):SSLS-AA¹⁷-LFF (SEQ ID NO: 13815), KASKAXXVPEKL (SEQ ID NO: 13735):SSLS-AA¹⁷-LFF (SEQ ID NO: 13815), GSAGPXXVPEKM (SEQ ID NO: 13709):SSLS-AA¹⁷-LFF (SEQ ID NO: 13815), AAPASXXVPERL (SEQ ID NO: 13669):SSLS-AA¹⁷-LFF (SEQ ID NO: 13815), STPPTXXVPERL (SEQ ID NO: 13781):SSLS-AA¹⁷-LFF (SEQ ID NO: 13815), HVPKPXXVPEKL (SEQ ID NO: 13717):SSLS-AA¹⁷-LFF (SEQ ID NO: 13815), RVPSTXXVPEKT (SEQ ID NO: 13763):SSLS-AA¹⁷-LFF (SEQ ID NO: 13815), ASAAPXXVPEAL (SEQ ID NO: 13677):SSLS-AA¹⁷-LFF (SEQ ID NO: 13815), ASASPXXVPEDL (SEQ ID NO: 13685):SSLS-AA¹⁷-LFF (SEQ ID NO: 13815), KIPKAXXVPTEL (SEQ ID NO: 13745):SSLS-AA¹⁷-LFF (SEQ ID NO: 13815), SIPKAXXVPTEL (SEQ ID NO: 13773):SSLS-AA¹⁷-LFF (SEQ ID NO: 13815), HVTKPTXAPTKL (SEQ ID NO: 13721):SSLS-AA¹⁷-LFF (SEQ ID NO: 13815), YVPKPXXAPTKL (SEQ ID NO: 13793):SSLS-AA¹⁷-LFF (SEQ ID NO: 13815), TVPKPXXAPTQL (SEQ ID NO: 13785):SSLS-AA¹⁷-LFF (SEQ ID NO: 13815), AVPKAXXAPTKL (SEQ ID NO: 13689):SSLS-AA¹⁷-LFF (SEQ ID NO: 13815), KVGKAXXVPTKL (SEQ ID NO: 13753):SSLS-AA¹⁷-LFF (SEQ ID NO: 13815), KASKAXXVPTKL (SEQ ID NO: 13737):SSLS-AA¹⁷-LFF (SEQ ID NO: 13815), GSAGPXXTPTKM (SEQ ID NO: 13707):SSLS-AA¹⁷-LFF (SEQ ID NO: 13815), AAPASXXVPARL (SEQ ID NO: 13668):SSLS-AA¹⁷-LFF (SEQ ID NO: 13815), STPPTXXVPTRL (SEQ ID NO: 13783):SSLS-AA¹⁷-LFF (SEQ ID NO: 13815), HVPKPXXAPTKL (SEQ ID NO: 13713):SSLS-AA¹⁷-LFF (SEQ ID NO: 13815), RVPSTXXAPVKT (SEQ ID NO: 13760):SSLS-AA¹⁷-LFF (SEQ ID NO: 13815), ASAAPXXVPQAL (SEQ ID NO: 13678):SSLS-AA¹⁷-LFF (SEQ ID NO: 13815), ASASPXXVSQDL (SEQ ID NO: 13688):SSLS-AA¹⁷-LFF (SEQ ID NO: 13815), ASASPXXVPQDL (SEQ ID NO: 13686):SSLS-AA¹⁷-LFF (SEQ ID NO: 13815), NDEGLEXVPTEE (SEQ ID NO: 13755):SSLS-AA¹⁷-LFF (SEQ ID NO: 13815), NDEGLEXVPTGQ (SEQ ID NO: 13756):SSLS-AA¹⁷-LFF (SEQ ID NO: 13815), SSVKXQPSRVHH (SEQ ID NO: 13775):SSLS-AA¹⁷-LFF (SEQ ID NO: 13815), RNVQXRPTQVQL (SEQ ID NO: 13758):SSLS-AA¹⁷-LFF (SEQ ID NO: 13815), KIPKAXXAPTEL (SEQ ID NO: 13739):NAIS-AA¹⁷-LYF (SEQ ID NO: 13805), GIPEPXXAPTKM (SEQ ID NO: 13697):NAIS-AA¹⁷-LYF (SEQ ID NO: 13805), SIPKAXXAPTEL (SEQ ID NO: 13767):NAIS-AA¹⁷-LYF (SEQ ID NO: 13805), AVPKAXXAPTKL (SEQ ID NO: 13689):NAIS-AA¹⁷-LYF (SEQ ID NO: 13805), KVGKAXXAPTKL (SEQ ID NO: 13747):NAIS-AA¹⁷-LYF (SEQ ID NO: 13805), KASKAXXAPTKL (SEQ ID NO: 13731):NAIS-AA¹⁷-LYF (SEQ ID NO: 13805), GSAGPXXAPTKM (SEQ ID NO: 13705):NAIS-AA¹⁷-LYF (SEQ ID NO: 13805), AAPASXXAPTRL (SEQ ID NO: 13665):NAIS-AA¹⁷-LYF (SEQ ID NO: 13805), STPPTXXAPTRL (SEQ ID NO: 13777):NAIS-AA¹⁷-LYF (SEQ ID NO: 13805), RVPSTXXAPTKT (SEQ ID NO: 13759):NAIS-AA¹⁷-LYF (SEQ ID NO: 13805), ASAAPXXAPTAL (SEQ ID NO: 13673):NAIS-AA¹⁷-LYF (SEQ ID NO: 13805), ASASPXXAPTDL (SEQ ID NO: 13681):NAIS-AA¹⁷-LYF (SEQ ID NO: 13805), KIPKAXXVPTEL (SEQ ID NO: 13745):NAIS-AA¹⁷-LYF (SEQ ID NO: 13805), GIPEPXXVPEKM (SEQ ID NO: 13701):NAIS-AA¹⁷-LYF (SEQ ID NO: 13805), SIPKAXXVPTEL (SEQ ID NO: 13773):NAIS-AA¹⁷-LYF (SEQ ID NO: 13805), KVGKAXXVPTKL (SEQ ID NO: 13753):NAIS-AA¹⁷-LYF (SEQ ID NO: 13805), KASKAXXVPTKL (SEQ ID NO: 13737):NAIS-AA¹⁷-LYF (SEQ ID NO: 13805), GSAGPXXTPTKM (SEQ ID NO: 13707):NAIS-AA¹⁷-LYF (SEQ ID NO: 13805), AAPASXXVPARL (SEQ ID NO: 13668):NAIS-AA¹⁷-LYF (SEQ ID NO: 13805), STPPTXXVPTRL (SEQ ID NO: 13783):NAIS-AA¹⁷-LYF (SEQ ID NO: 13805), RVPSTXXAPVKT (SEQ ID NO: 13760):NAIS-AA¹⁷-LYF (SEQ ID NO: 13805), ASAAPXXVPQAL (SEQ ID NO: 13678):NAIS-AA¹⁷-LYF (SEQ ID NO: 13805), ASASPXXVSQDL (SEQ ID NO: 13688):NAIS-AA¹⁷-LYF (SEQ ID NO: 13805), ASASPXXVPQDL (SEQ ID NO: 13686):NAIS-AA¹⁷-LYF (SEQ ID NO: 13805), NDEGLEXVPTEE (SEQ ID NO: 13755):NAIS-AA¹⁷-LYF (SEQ ID NO: 13805), NDEGLEXVPTGQ (SEQ ID NO: 13756):NAIS-AA¹⁷-LYF (SEQ ID NO: 13805), SSVKXQPSRVHH (SEQ ID NO: 13775):NAIS-AA¹⁷-LYF (SEQ ID NO: 13805), RNVQXRPTQVQL (SEQ ID NO: 13758):NAIS-AA¹⁷-LYF (SEQ ID NO: 13805), KIPKAXXAPTEL (SEQ ID NO: 13739):SATS-AA¹⁷-LYY (SEQ ID NO: 13809), GIPEPXXAPTKM (SEQ ID NO: 13697):SATS-AA¹⁷-LYY (SEQ ID NO: 13809), SIPKAXXAPTEL (SEQ ID NO: 13767):SATS-AA¹⁷-LYY (SEQ ID NO: 13809), HVTKPTXAPTKL (SEQ ID NO: 13721):SATS-AA¹⁷-LYY (SEQ ID NO: 13809), YVPKPXXAPTKL (SEQ ID NO: 13793):SATS-AA¹⁷-LYY (SEQ ID NO: 13809), TVPKPXXAPTQL (SEQ ID NO: 13785):SATS-AA¹⁷-LYY (SEQ ID NO: 13809), KVGKAXXAPTKL (SEQ ID NO: 13747):SATS-AA¹⁷-LYY (SEQ ID NO: 13809), KASKAXXAPTKL (SEQ ID NO: 13731):SATS-AA¹⁷-LYY (SEQ ID NO: 13809), GSAGPXXAPTKM (SEQ ID NO: 13705):SATS-AA¹⁷-LYY (SEQ ID NO: 13809), AAPASXXAPTRL (SEQ ID NO: 13665):SATS-AA¹⁷-LYY (SEQ ID NO: 13809), STPPTXXAPTRL (SEQ ID NO: 13777):SATS-AA¹⁷-LYY (SEQ ID NO: 13809), HVPKPXXAPTKL (SEQ ID NO: 13713):SATS-AA¹⁷-LYY (SEQ ID NO: 13809), RVPSTXXAPTKT (SEQ ID NO: 13759):SATS-AA¹⁷-LYY (SEQ ID NO: 13809), ASAAPXXAPTAL (SEQ ID NO: 13673):SATS-AA¹⁷-LYY (SEQ ID NO: 13809), ASASPXXAPTDL (SEQ ID NO: 13681):SATS-AA¹⁷-LYY (SEQ ID NO: 13809), KIPKAXXVPTEL (SEQ ID NO: 13745):SATS-AA¹⁷-LYY (SEQ ID NO: 13809), GIPEPXXVPEKM (SEQ ID NO: 13701):SATS-AA¹⁷-LYY (SEQ ID NO: 13809), SIPKAXXVPTEL (SEQ ID NO: 13773):SATS-AA¹⁷-LYY (SEQ ID NO: 13809), KVGKAXXVPTKL (SEQ ID NO: 13753):SATS-AA¹⁷-LYY (SEQ ID NO: 13809), KASKAXXVPTKL (SEQ ID NO: 13737):SATS-AA¹⁷-LYY (SEQ ID NO: 13809), GSAGPXXTPTKM (SEQ ID NO: 13707):SATS-AA¹⁷-LYY (SEQ ID NO: 13809), AAPASXXVPARL (SEQ ID NO: 13668):SATS-AA¹⁷-LYY (SEQ ID NO: 13809), STPPTXXVPTRL (SEQ ID NO: 13783):SATS-AA¹⁷-LYY (SEQ ID NO: 13809), RVPSTXXAPVKT (SEQ ID NO: 13760):SATS-AA¹⁷-LYY (SEQ ID NO: 13809), ASAAPXXVPQAL (SEQ ID NO: 13678):SATS-AA¹⁷-LYY (SEQ ID NO: 13809), ASASPXXVSQDL (SEQ ID NO: 13688):SATS-AA¹⁷-LYY (SEQ ID NO: 13809), ASASPXXVPQDL (SEQ ID NO: 13686):SATS-AA¹⁷-LYY (SEQ ID NO: 13809), NDEGLEXVPTEE (SEQ ID NO: 13755):SATS-AA¹⁷-LYY (SEQ ID NO: 13809), NDEGLEXVPTGQ (SEQ ID NO: 13756):SATS-AA¹⁷-LYY (SEQ ID NO: 13809), SSVKXQPSRVHH (SEQ ID NO: 13775):SATS-AA¹⁷-LYY (SEQ ID NO: 13809), RNVQXRPTQVQL (SEQ ID NO: 13758):SATS-AA¹⁷-LYY (SEQ ID NO: 13809), KIPKAXXVPTEL (SEQ ID NO: 13745):SPIS-AA¹⁷-LYK (SEQ ID NO: 13814), GIPEPXXVPTKM (SEQ ID NO: 13703):SPIS-AA¹⁷-LYK (SEQ ID NO: 13814), SIPKAXXVPTEL (SEQ ID NO: 13773):SPIS-AA¹⁷-LYK (SEQ ID NO: 13814), HVTKPTXVPTKL (SEQ ID NO: 13729):SPIS-AA¹⁷-LYK (SEQ ID NO: 13814), YVPKPXXVPTKL (SEQ ID NO: 13799):SPIS-AA¹⁷-LYK (SEQ ID NO: 13814), TVPKPXXVPTQL (SEQ ID NO: 13791):SPIS-AA¹⁷-LYK (SEQ ID NO: 13814), AVPKAXXVPTKL (SEQ ID NO: 13695):SPIS-AA¹⁷-LYK (SEQ ID NO: 13814), KASKAXXVPTKL (SEQ ID NO: 13737):SPIS-AA¹⁷-LYK (SEQ ID NO: 13814), GSAGPXXVPTKM (SEQ ID NO: 13711):SPIS-AA¹⁷-LYK (SEQ ID NO: 13814), AAPASXXVPTRL (SEQ ID NO: 13671):SPIS-AA¹⁷-LYK (SEQ ID NO: 13814), STPPTXXVPTRL (SEQ ID NO: 13783):SPIS-AA¹⁷-LYK (SEQ ID NO: 13814), HVPKPXXVPTKL (SEQ ID NO: 13719):SPIS-AA¹⁷-LYK (SEQ ID NO: 13814), RVPSTXXVPTKT (SEQ ID NO: 13765):SPIS-AA¹⁷-LYK (SEQ ID NO: 13814), ASAAPXXVPTAL (SEQ ID NO: 13679):SPIS-AA¹⁷-LYK (SEQ ID NO: 13814), ASASPXXVPTDL (SEQ ID NO: 13687):SPIS-AA¹⁷-LYK (SEQ ID NO: 13814), GIPEPXXVPEKM (SEQ ID NO: 13701):SPIS-AA¹⁷-LYK (SEQ ID NO: 13814), HVTKPTXAPTKL (SEQ ID NO: 13721):SPIS-AA¹⁷-LYK (SEQ ID NO: 13814), YVPKPXXAPTKL (SEQ ID NO: 13793):SPIS-AA¹⁷-LYK (SEQ ID NO: 13814), TVPKPXXAPTQL (SEQ ID NO: 13785):SPIS-AA¹⁷-LYK (SEQ ID NO: 13814), AVPKAXXAPTKL (SEQ ID NO: 13689):SPIS-AA¹⁷-LYK (SEQ ID NO: 13814), GSAGPXXTPTKM (SEQ ID NO: 13707):SPIS-AA¹⁷-LYK (SEQ ID NO: 13814), AAPASXXVPARL (SEQ ID NO: 13668):SPIS-AA¹⁷-LYK (SEQ ID NO: 13814), HVPKPXXAPTKL (SEQ ID NO: 13713):SPIS-AA¹⁷-LYK (SEQ ID NO: 13814), RVPSTXXAPVKT (SEQ ID NO: 13760):SPIS-AA¹⁷-LYK (SEQ ID NO: 13814), ASAAPXXVPQAL (SEQ ID NO: 13678):SPIS-AA¹⁷-LYK (SEQ ID NO: 13814), ASASPXXVSQDL (SEQ ID NO: 13688):SPIS-AA¹⁷-LYK (SEQ ID NO: 13814), ASASPXXVPQDL (SEQ ID NO: 13686):SPIS-AA¹⁷-LYK (SEQ ID NO: 13814), SSVKXQPSRVHH (SEQ ID NO: 13775):SPIS-AA¹⁷-LYK (SEQ ID NO: 13814), RNVQXRPTQVQL (SEQ ID NO: 13758):SPIS-AA¹⁷-LYK (SEQ ID NO: 13814), KIPKAXXVPTEL (SEQ ID NO: 13745):EPIS-AA¹⁷-LYL (SEQ ID NO: 13801), GIPEPXXVPTKM (SEQ ID NO: 13703):EPIS-AA¹⁷-LYL (SEQ ID NO: 13801), SIPKAXXVPTEL (SEQ ID NO: 13773):EPIS-AA¹⁷-LYL (SEQ ID NO: 13801), HVTKPTXVPTKL (SEQ ID NO: 13729):EPIS-AA¹⁷-LYL (SEQ ID NO: 13801), YVPKPXXVPTKL (SEQ ID NO: 13799):EPIS-AA¹⁷-LYL (SEQ ID NO: 13801), TVPKPXXVPTQL (SEQ ID NO: 13791):EPIS-AA¹⁷-LYL (SEQ ID NO: 13801), AVPKAXXVPTKL (SEQ ID NO: 13695):EPIS-AA¹⁷-LYL (SEQ ID NO: 13801), KVGKAXXVPTKL (SEQ ID NO: 13753):EPIS-AA¹⁷-LYL (SEQ ID NO: 13801), GSAGPXXVPTKM (SEQ ID NO: 13711):EPIS-AA¹⁷-LYL (SEQ ID NO: 13801), AAPASXXVPTRL (SEQ ID NO: 13671):EPIS-AA¹⁷-LYL (SEQ ID NO: 13801), STPPTXXVPTRL (SEQ ID NO: 13783):EPIS-AA¹⁷-LYL (SEQ ID NO: 13801), HVPKPXXVPTKL (SEQ ID NO: 13719):EPIS-AA¹⁷-LYL (SEQ ID NO: 13801), RVPSTXXVPTKT (SEQ ID NO: 13765):EPIS-AA¹⁷-LYL (SEQ ID NO: 13801), ASAAPXXVPTAL (SEQ ID NO: 13679):EPIS-AA¹⁷-LYL (SEQ ID NO: 13801), ASASPXXVPTDL (SEQ ID NO: 13687):EPIS-AA¹⁷-LYL (SEQ ID NO: 13801), GIPEPXXVPEKM (SEQ ID NO: 13701):EPIS-AA¹⁷-LYL (SEQ ID NO: 13801), HVTKPTXAPTKL (SEQ ID NO: 13721):EPIS-AA¹⁷-LYL (SEQ ID NO: 13801), YVPKPXXAPTKL (SEQ ID NO: 13793):EPIS-AA¹⁷-LYL (SEQ ID NO: 13801), TVPKPXXAPTQL (SEQ ID NO: 13785):EPIS-AA¹⁷-LYL (SEQ ID NO: 13801), AVPKAXXAPTKL (SEQ ID NO: 13689):EPIS-AA¹⁷-LYL (SEQ ID NO: 13801), GSAGPXXTPTKM (SEQ ID NO: 13707):EPIS-AA¹⁷-LYL (SEQ ID NO: 13801), AAPASXXVPARL (SEQ ID NO: 13668):EPIS-AA¹⁷-LYL (SEQ ID NO: 13801), HVPKPXXAPTKL (SEQ ID NO: 13713):EPIS-AA¹⁷-LYL (SEQ ID NO: 13801), RVPSTXXAPVKT (SEQ ID NO: 13760):EPIS-AA¹⁷-LYL (SEQ ID NO: 13801), ASAAPXXVPQAL (SEQ ID NO: 13678):EPIS-AA¹⁷-LYL (SEQ ID NO: 13801), ASASPXXVSQDL (SEQ ID NO: 13688):EPIS-AA¹⁷-LYL (SEQ ID NO: 13801), ASASPXXVPQDL (SEQ ID NO: 13686):EPIS-AA¹⁷-LYL (SEQ ID NO: 13801), SSVKXQPSRVHH (SEQ ID NO: 13775):EPIS-AA¹⁷-LYL (SEQ ID NO: 13801), RNVQXRPTQVQL (SEQ ID NO: 13758):EPIS-AA¹⁷-LYL (SEQ ID NO: 13801), KIPKAXXTPTEL (SEQ ID NO: 13741):SPIN-AA¹⁷-LYF (SEQ ID NO: 13811), GIPEPXXTPTKM (SEQ ID NO: 13699):SPIN-AA¹⁷-LYF (SEQ ID NO: 13811), SIPKAXXTPTEL (SEQ ID NO: 13769):SPIN-AA¹⁷-LYF (SEQ ID NO: 13811), HVTKPTXTPTKL (SEQ ID NO: 13724):SPIN-AA¹⁷-LYF (SEQ ID NO: 13811), YVPKPXXTPTKL (SEQ ID NO: 13795):SPIN-AA¹⁷-LYF (SEQ ID NO: 13811), TVPKPXXTPTQL (SEQ ID NO: 13787):SPIN-AA¹⁷-LYF (SEQ ID NO: 13811), AVPKAXXTPTKL (SEQ ID NO: 13691):SPIN-AA¹⁷-LYF (SEQ ID NO: 13811), KVGKAXXTPTKL (SEQ ID NO: 13749):SPIN-AA¹⁷-LYF (SEQ ID NO: 13811), KASKAXXTPTKL (SEQ ID NO: 13733):SPIN-AA¹⁷-LYF (SEQ ID NO: 13811), AAPASXXTPTRL (SEQ ID NO: 13667):SPIN-AA¹⁷-LYF (SEQ ID NO: 13811), STPPTXXTPTRL (SEQ ID NO: 13779):SPIN-AA¹⁷-LYF (SEQ ID NO: 13811), HVPKPXXTPTKL (SEQ ID NO: 13715):SPIN-AA¹⁷-LYF (SEQ ID NO: 13811), RVPSTXXTPTKT (SEQ ID NO: 13761):SPIN-AA¹⁷-LYF (SEQ ID NO: 13811), ASAAPXXTPTAL (SEQ ID NO: 13675):SPIN-AA¹⁷-LYF (SEQ ID NO: 13811), ASASPXXTPTDL (SEQ ID NO: 13683):SPIN-AA¹⁷-LYF (SEQ ID NO: 13811), KIPKAXXVPTEL (SEQ ID NO: 13745):SPIN-AA¹⁷-LYF (SEQ ID NO: 13811), GIPEPXXVPEKM (SEQ ID NO: 13701):SPIN-AA¹⁷-LYF (SEQ ID NO: 13811), SIPKAXXVPTEL (SEQ ID NO: 13773):SPIN-AA¹⁷-LYF (SEQ ID NO: 13811), HVTKPTXAPTKL (SEQ ID NO: 13721):SPIN-AA¹⁷-LYF (SEQ ID NO: 13811), YVPKPXXAPTKL (SEQ ID NO: 13793):SPIN-AA¹⁷-LYF (SEQ ID NO: 13811), TVPKPXXAPTQL (SEQ ID NO: 13785):SPIN-AA¹⁷-LYF (SEQ ID NO: 13811), AVPKAXXAPTKL (SEQ ID NO: 13689):SPIN-AA¹⁷-LYF (SEQ ID NO: 13811), KVGKAXXVPTKL (SEQ ID NO: 13753):SPIN-AA¹⁷-LYF (SEQ ID NO: 13811), KASKAXXVPTKL (SEQ ID NO: 13737):SPIN-AA¹⁷-LYF (SEQ ID NO: 13811), AAPASXXVPARL (SEQ ID NO: 13668):SPIN-AA¹⁷-LYF (SEQ ID NO: 13811), STPPTXXVPTRL (SEQ ID NO: 13783):SPIN-AA¹⁷-LYF (SEQ ID NO: 13811), HVPKPXXAPTKL (SEQ ID NO: 13713):SPIN-AA¹⁷-LYF (SEQ ID NO: 13811), RVPSTXXAPVKT (SEQ ID NO: 13760):SPIN-AA¹⁷-LYF (SEQ ID NO: 13811), ASAAPXXVPQAL (SEQ ID NO: 13678):SPIN-AA¹⁷-LYF (SEQ ID NO: 13811), ASASPXXVSQDL (SEQ ID NO: 13688):SPIN-AA¹⁷-LYF (SEQ ID NO: 13811), ASASPXXVPQDL (SEQ ID NO: 13686):SPIN-AA¹⁷-LYF (SEQ ID NO: 13811), NDEGLEXVPTEE (SEQ ID NO: 13755):SPIN-AA¹⁷-LYF (SEQ ID NO: 13811), NDEGLEXVPTGQ (SEQ ID NO: 13756):SPIN-AA¹⁷-LYF (SEQ ID NO: 13811), SSVKXQPSRVHH (SEQ ID NO: 13775):SPIN-AA¹⁷-LYF (SEQ ID NO: 13811), RNVQXRPTQVQL (SEQ ID NO: 13758):SPIN-AA¹⁷-LYF (SEQ ID NO: 13811), KIPKAXXVPAEL (SEQ ID NO: 13742):SPIS-AA¹⁷-LYI (SEQ ID NO: 13813), GIPEPXXVPAKM (SEQ ID NO: 13700):SPIS-AA¹⁷-LYI (SEQ ID NO: 13813), SIPKAXXVPAEL (SEQ ID NO: 13770):SPIS-AA¹⁷-LYI (SEQ ID NO: 13813), HVTKPTXVPAKL (SEQ ID NO: 13726):SPIS-AA¹⁷-LYI (SEQ ID NO: 13813), YVPKPXXVPAKL (SEQ ID NO: 13796):SPIS-AA¹⁷-LYI (SEQ ID NO: 13813), TVPKPXXVPAQL (SEQ ID NO: 13788):SPIS-AA¹⁷-LYI (SEQ ID NO: 13813), AVPKAXXVPAKL (SEQ ID NO: 13692):SPIS-AA¹⁷-LYI (SEQ ID NO: 13813), KVGKAXXVPAKL (SEQ ID NO: 13750):SPIS-AA¹⁷-LYI (SEQ ID NO: 13813), KASKAXXVPAKL (SEQ ID NO: 13734):SPIS-AA¹⁷-LYI (SEQ ID NO: 13813), GSAGPXXVPAKM (SEQ ID NO: 13708):SPIS-AA¹⁷-LYI (SEQ ID NO: 13813), STPPTXXVPARL (SEQ ID NO: 13780):SPIS-AA¹⁷-LYI (SEQ ID NO: 13813), HVPKPXXVPAKL (SEQ ID NO: 13716):SPIS-AA¹⁷-LYI (SEQ ID NO: 13813), RVPSTXXVPAKT (SEQ ID NO: 13762):SPIS-AA¹⁷-LYI (SEQ ID NO: 13813), ASAAPXXVPAAL (SEQ ID NO: 13676):SPIS-AA¹⁷-LYI (SEQ ID NO: 13813), ASASPXXVPADL (SEQ ID NO: 13684):SPIS-AA¹⁷-LYI (SEQ ID NO: 13813), KIPKAXXVPTEL (SEQ ID NO: 13745):SPIS-AA¹⁷-LYI (SEQ ID NO: 13813), GIPEPXXVPEKM (SEQ ID NO: 13701):SPIS-AA¹⁷-LYI (SEQ ID NO: 13813), SIPKAXXVPTEL (SEQ ID NO: 13773):SPIS-AA¹⁷-LYI (SEQ ID NO: 13813), HVTKPTXAPTKL (SEQ ID NO: 13721):SPIS-AA¹⁷-LYI (SEQ ID NO: 13813), YVPKPXXAPTKL (SEQ ID NO: 13793):SPIS-AA¹⁷-LYI (SEQ ID NO: 13813), TVPKPXXAPTQL (SEQ ID NO: 13785):SPIS-AA¹⁷-LYI (SEQ ID NO: 13813), AVPKAXXAPTKL (SEQ ID NO: 13689):SPIS-AA¹⁷-LYI (SEQ ID NO: 13813), KVGKAXXVPTKL (SEQ ID NO: 13753):SPIS-AA¹⁷-LYI (SEQ ID NO: 13813), KASKAXXVPTKL (SEQ ID NO: 13737):SPIS-AA¹⁷-LYI (SEQ ID NO: 13813), GSAGPXXTPTKM (SEQ ID NO: 13707):SPIS-AA¹⁷-LYI (SEQ ID NO: 13813), STPPTXXVPTRL (SEQ ID NO: 13783):SPIS-AA¹⁷-LYI (SEQ ID NO: 13813), HVPKPXXAPTKL (SEQ ID NO: 13713):SPIS-AA¹⁷-LYI (SEQ ID NO: 13813), RVPSTXXAPVKT (SEQ ID NO: 13760):SPIS-AA¹⁷-LYI (SEQ ID NO: 13813), ASAAPXXVPQAL (SEQ ID NO: 13678):SPIS-AA¹⁷-LYI (SEQ ID NO: 13813), ASASPXXVSQDL (SEQ ID NO: 13688):SPIS-AA¹⁷-LYI (SEQ ID NO: 13813), ASASPXXVPQDL (SEQ ID NO: 13686):SPIS-AA¹⁷-LYI (SEQ ID NO: 13813), NDEGLEXVPTEE (SEQ ID NO: 13755):SPIS-AA¹⁷-LYI (SEQ ID NO: 13813), NDEGLEXVPTGQ (SEQ ID NO: 13756):SPIS-AA¹⁷-LYI (SEQ ID NO: 13813), SSVKXQPSRVHH (SEQ ID NO: 13775):SPIS-AA¹⁷-LYI (SEQ ID NO: 13813), RNVQXRPTQVQL (SEQ ID NO: 13758):SPIS-AA¹⁷-LYI (SEQ ID NO: 13813), KIPKAXXVPTEL (SEQ ID NO: 13745):SPIS-AA¹⁷-LFI (SEQ ID NO: 13812), GIPEPXXVPTKM (SEQ ID NO: 13703):SPIS-AA¹⁷-LFI (SEQ ID NO: 13812), SIPKAXXVPTEL (SEQ ID NO: 13773):SPIS-AA¹⁷-LFI (SEQ ID NO: 13812), HVTKPTXVPTKL (SEQ ID NO: 13729):SPIS-AA¹⁷-LFI (SEQ ID NO: 13812), YVPKPXXVPTKL (SEQ ID NO: 13799):SPIS-AA¹⁷-LFI (SEQ ID NO: 13812), TVPKPXXVPTQL (SEQ ID NO: 13791):SPIS-AA¹⁷-LFI (SEQ ID NO: 13812), AVPKAXXVPTKL (SEQ ID NO: 13695):SPIS-AA¹⁷-LFI (SEQ ID NO: 13812), KVGKAXXVPTKL (SEQ ID NO: 13753):SPIS-AA¹⁷-LFI (SEQ ID NO: 13812), KASKAXXVPTKL (SEQ ID NO: 13737):SPIS-AA¹⁷-LFI (SEQ ID NO: 13812), GSAGPXXVPTKM (SEQ ID NO: 13711):SPIS-AA¹⁷-LFI (SEQ ID NO: 13812), AAPASXXVPTRL (SEQ ID NO: 13671):SPIS-AA¹⁷-LFI (SEQ ID NO: 13812), HVPKPXXVPTKL (SEQ ID NO: 13719):SPIS-AA¹⁷-LFI (SEQ ID NO: 13812), RVPSTXXVPTKT (SEQ ID NO: 13765):SPIS-AA¹⁷-LFI (SEQ ID NO: 13812), ASAAPXXVPTAL (SEQ ID NO: 13679):SPIS-AA¹⁷-LFI (SEQ ID NO: 13812), ASASPXXVPTDL (SEQ ID NO: 13687):SPIS-AA¹⁷-LFI (SEQ ID NO: 13812), GIPEPXXVPEKM (SEQ ID NO: 13701):SPIS-AA¹⁷-LFI (SEQ ID NO: 13812), HVTKPTXAPTKL (SEQ ID NO: 13721):SPIS-AA¹⁷-LFI (SEQ ID NO: 13812), YVPKPXXAPTKL (SEQ ID NO: 13793):SPIS-AA¹⁷-LFI (SEQ ID NO: 13812), TVPKPXXAPTQL (SEQ ID NO: 13785):SPIS-AA¹⁷-LFI (SEQ ID NO: 13812), AVPKAXXAPTKL (SEQ ID NO: 13689):SPIS-AA¹⁷-LFI (SEQ ID NO: 13812), GSAGPXXTPTKM (SEQ ID NO: 13707):SPIS-AA¹⁷-LFI (SEQ ID NO: 13812), AAPASXXVPARL (SEQ ID NO: 13668):SPIS-AA¹⁷-LFI (SEQ ID NO: 13812), HVPKPXXAPTKL (SEQ ID NO: 13713):SPIS-AA¹⁷-LFI (SEQ ID NO: 13812), RVPSTXXAPVKT (SEQ ID NO: 13760):SPIS-AA¹⁷-LFI (SEQ ID NO: 13812), ASAAPXXVPQAL (SEQ ID NO: 13678):SPIS-AA¹⁷-LFI (SEQ ID NO: 13812), ASASPXXVSQDL (SEQ ID NO: 13688):SPIS-AA¹⁷-LFI (SEQ ID NO: 13812), ASASPXXVPQDL (SEQ ID NO: 13686):SPIS-AA¹⁷-LFI (SEQ ID NO: 13812), SSVKXQPSRVHH (SEQ ID NO: 13775):SPIS-AA¹⁷-LFI (SEQ ID NO: 13812), RNVQXRPTQVQL (SEQ ID NO: 13758):SPIS-AA¹⁷-LFI (SEQ ID NO: 13812), KIPKAXXAPVEL (SEQ ID NO: 13740):KPLS-AA¹⁷-LYV (SEQ ID NO: 13804), GIPEPXXAPVKM (SEQ ID NO: 13698):KPLS-AA¹⁷-LYV (SEQ ID NO: 13804), SIPKAXXAPVEL (SEQ ID NO: 13768):KPLS-AA¹⁷-LYV (SEQ ID NO: 13804), HVTKPTXAPVKL (SEQ ID NO: 13722):KPLS-AA¹⁷-LYV (SEQ ID NO: 13804), YVPKPXXAPVKL (SEQ ID NO: 13794):KPLS-AA¹⁷-LYV (SEQ ID NO: 13804), TVPKPXXAPVQL (SEQ ID NO: 13786):KPLS-AA¹⁷-LYV (SEQ ID NO: 13804), AVPKAXXAPVKL (SEQ ID NO: 13690):KPLS-AA¹⁷-LYV (SEQ ID NO: 13804), KVGKAXXAPVKL (SEQ ID NO: 13748):KPLS-AA¹⁷-LYV (SEQ ID NO: 13804), KASKAXXAPVKL (SEQ ID NO: 13732):KPLS-AA¹⁷-LYV (SEQ ID NO: 13804), GSAGPXXAPVKM (SEQ ID NO: 13706):KPLS-AA¹⁷-LYV (SEQ ID NO: 13804), AAPASXXAPVRL (SEQ ID NO: 13666):KPLS-AA¹⁷-LYV (SEQ ID NO: 13804), STPPTXXAPVRL (SEQ ID NO: 13778):KPLS-AA¹⁷-LYV (SEQ ID NO: 13804), HVPKPXXAPVKL (SEQ ID NO: 13714):KPLS-AA¹⁷-LYV (SEQ ID NO: 13804), ASAAPXXAPVAL (SEQ ID NO: 13674):KPLS-AA¹⁷-LYV (SEQ ID NO: 13804), ASASPXXAPVDL (SEQ ID NO: 13682):KPLS-AA¹⁷-LYV (SEQ ID NO: 13804), KIPKAXXVPTEL (SEQ ID NO: 13745):KPLS-AA¹⁷-LYV (SEQ ID NO: 13804), GIPEPXXVPEKM (SEQ ID NO: 13701):KPLS-AA¹⁷-LYV (SEQ ID NO: 13804), SIPKAXXVPTEL (SEQ ID NO: 13773):KPLS-AA¹⁷-LYV (SEQ ID NO: 13804), HVTKPTXAPTKL (SEQ ID NO: 13721):KPLS-AA¹⁷-LYV (SEQ ID NO: 13804), YVPKPXXAPTKL (SEQ ID NO: 13793):KPLS-AA¹⁷-LYV (SEQ ID NO: 13804), TVPKPXXAPTQL (SEQ ID NO: 13785):KPLS-AA¹⁷-LYV (SEQ ID NO: 13804), AVPKAXXAPTKL (SEQ ID NO: 13689):KPLS-AA¹⁷-LYV (SEQ ID NO: 13804), KVGKAXXVPTKL (SEQ ID NO: 13753):KPLS-AA¹⁷-LYV (SEQ ID NO: 13804), KASKAXXVPTKL (SEQ ID NO: 13737):KPLS-AA¹⁷-LYV (SEQ ID NO: 13804), GSAGPXXTPTKM (SEQ ID NO: 13707):KPLS-AA¹⁷-LYV (SEQ ID NO: 13804), AAPASXXVPARL (SEQ ID NO: 13668):KPLS-AA¹⁷-LYV (SEQ ID NO: 13804), STPPTXXVPTRL (SEQ ID NO: 13783):KPLS-AA¹⁷-LYV (SEQ ID NO: 13804), HVPKPXXAPTKL (SEQ ID NO: 13713):KPLS-AA¹⁷-LYV (SEQ ID NO: 13804), ASAAPXXVPQAL (SEQ ID NO: 13678):KPLS-AA¹⁷-LYV (SEQ ID NO: 13804), ASASPXXVSQDL (SEQ ID NO: 13688):KPLS-AA¹⁷-LYV (SEQ ID NO: 13804), ASASPXXVPQDL (SEQ ID NO: 13686):KPLS-AA¹⁷-LYV (SEQ ID NO: 13804), NDEGLEXVPTEE (SEQ ID NO: 13755):KPLS-AA¹⁷-LYV (SEQ ID NO: 13804), NDEGLEXVPTGQ (SEQ ID NO: 13756):KPLS-AA¹⁷-LYV (SEQ ID NO: 13804), SSVKXQPSRVHH (SEQ ID NO: 13775):KPLS-AA¹⁷-LYV (SEQ ID NO: 13804), RNVQXRPTQVQL (SEQ ID NO: 13758):KPLS-AA¹⁷-LYV (SEQ ID NO: 13804), KIPKAXXVPQEL (SEQ ID NO: 13744):EPLP-AA¹⁷-VYY (SEQ ID NO: 13802), GIPEPXXVPQKM (SEQ ID NO: 13702):EPLP-AA¹⁷-VYY (SEQ ID NO: 13802), SIPKAXXVPQEL (SEQ ID NO: 13772):EPLP-AA¹⁷-VYY (SEQ ID NO: 13802), HVTKPTXVPQKL (SEQ ID NO: 13728):EPLP-AA¹⁷-VYY (SEQ ID NO: 13802), YVPKPXXVPQKL (SEQ ID NO: 13798):EPLP-AA¹⁷-VYY (SEQ ID NO: 13802), TVPKPXXVPQQL (SEQ ID NO: 13790):EPLP-AA¹⁷-VYY (SEQ ID NO: 13802), AVPKAXXVPQKL (SEQ ID NO: 13694):EPLP-AA¹⁷-VYY (SEQ ID NO: 13802), KVGKAXXVPQKL (SEQ ID NO: 13752):EPLP-AA¹⁷-VYY (SEQ ID NO: 13802), KASKAXXVPQKL (SEQ ID NO: 13736):EPLP-AA¹⁷-VYY (SEQ ID NO: 13802), GSAGPXXVPQKM (SEQ ID NO: 13710):EPLP-AA¹⁷-VYY (SEQ ID NO: 13802), AAPASXXVPQRL (SEQ ID NO: 13670):EPLP-AA¹⁷-VYY (SEQ ID NO: 13802), STPPTXXVPQRL (SEQ ID NO: 13782):EPLP-AA¹⁷-VYY (SEQ ID NO: 13802), HVPKPXXVPQKL (SEQ ID NO: 13718):EPLP-AA¹⁷-VYY (SEQ ID NO: 13802), RVPSTXXVPQKT (SEQ ID NO: 13764):EPLP-AA¹⁷-VYY (SEQ ID NO: 13802), ASASPXXVPQDL (SEQ ID NO: 13686):EPLP-AA¹⁷-VYY (SEQ ID NO: 13802), KIPKAXXVPTEL (SEQ ID NO: 13745):EPLP-AA¹⁷-VYY (SEQ ID NO: 13802), GIPEPXXVPEKM (SEQ ID NO: 13701):EPLP-AA¹⁷-VYY (SEQ ID NO: 13802), SIPKAXXVPTEL (SEQ ID NO: 13773):EPLP-AA¹⁷-VYY (SEQ ID NO: 13802), HVTKPTXAPTKL (SEQ ID NO: 13721):EPLP-AA¹⁷-VYY (SEQ ID NO: 13802), YVPKPXXAPTKL (SEQ ID NO: 13793):EPLP-AA¹⁷-VYY (SEQ ID NO: 13802), TVPKPXXAPTQL (SEQ ID NO: 13785):EPLP-AA¹⁷-VYY (SEQ ID NO: 13802), AVPKAXXAPTKL (SEQ ID NO: 13689):EPLP-AA¹⁷-VYY (SEQ ID NO: 13802), KVGKAXXVPTKL (SEQ ID NO: 13753):EPLP-AA¹⁷-VYY (SEQ ID NO: 13802), KASKAXXVPTKL (SEQ ID NO: 13737):EPLP-AA¹⁷-VYY (SEQ ID NO: 13802), GSAGPXXTPTKM (SEQ ID NO: 13707):EPLP-AA¹⁷-VYY (SEQ ID NO: 13802), AAPASXXVPARL (SEQ ID NO: 13668):EPLP-AA¹⁷-VYY (SEQ ID NO: 13802), STPPTXXVPTRL (SEQ ID NO: 13783):EPLP-AA¹⁷-VYY (SEQ ID NO: 13802), HVPKPXXAPTKL (SEQ ID NO: 13713):EPLP-AA¹⁷-VYY (SEQ ID NO: 13802), RVPSTXXAPVKT (SEQ ID NO: 13760):EPLP-AA¹⁷-VYY (SEQ ID NO: 13802), ASASPXXVSQDL (SEQ ID NO: 13688):EPLP-AA¹⁷-VYY (SEQ ID NO: 13802), NDEGLEXVPTEE (SEQ ID NO: 13755):EPLP-AA¹⁷-VYY (SEQ ID NO: 13802), NDEGLEXVPTGQ (SEQ ID NO: 13756):EPLP-AA¹⁷-VYY (SEQ ID NO: 13802), SSVKXQPSRVHH (SEQ ID NO: 13775):EPLP-AA¹⁷-VYY (SEQ ID NO: 13802), RNVQXRPTQVQL (SEQ ID NO: 13758):EPLP-AA¹⁷-VYY (SEQ ID NO: 13802), KIPKAXXVSQEL (SEQ ID NO: 13746):EPLT-AA¹⁷-LYY (SEQ ID NO: 13803), GIPEPXXVSQKM (SEQ ID NO: 13704):EPLT-AA¹⁷-LYY (SEQ ID NO: 13803), SIPKAXXVSQEL (SEQ ID NO: 13774):EPLT-AA¹⁷-LYY (SEQ ID NO: 13803), HVTKPTXVSQKL (SEQ ID NO: 13730):EPLT-AA¹⁷-LYY (SEQ ID NO: 13803), YVPKPXXVSQKL (SEQ ID NO: 13800):EPLT-AA¹⁷-LYY (SEQ ID NO: 13803), TVPKPXXVSQQL (SEQ ID NO: 13792):EPLT-AA¹⁷-LYY (SEQ ID NO: 13803), AVPKAXXVSQKL (SEQ ID NO: 13696):EPLT-AA¹⁷-LYY (SEQ ID NO: 13803), KVGKAXXVSQKL (SEQ ID NO: 13754):EPLT-AA¹⁷-LYY (SEQ ID NO: 13803), KASKAXXVSQKL (SEQ ID NO: 13738):EPLT-AA¹⁷-LYY (SEQ ID NO: 13803), GSAGPXXVSQKM (SEQ ID NO: 13712):EPLT-AA¹⁷-LYY (SEQ ID NO: 13803), AAPASXXVSQRL (SEQ ID NO: 13672):EPLT-AA¹⁷-LYY (SEQ ID NO: 13803), STPPTXXVSQRL (SEQ ID NO: 13784):EPLT-AA¹⁷-LYY (SEQ ID NO: 13803), HVPKPXXVSQKL (SEQ ID NO: 13720):EPLT-AA¹⁷-LYY (SEQ ID NO: 13803), RVPSTXXVSQKT (SEQ ID NO: 13766):EPLT-AA¹⁷-LYY (SEQ ID NO: 13803), ASAAPXXVSQAL (SEQ ID NO: 13680):EPLT-AA¹⁷-LYY (SEQ ID NO: 13803), ASASPXXVSQDL (SEQ ID NO: 13688):EPLT-AA¹⁷-LYY (SEQ ID NO: 13803), KIPKAXXVPTEL (SEQ ID NO: 13745):EPLT-AA¹⁷-LYY (SEQ ID NO: 13803), GIPEPXXVPEKM (SEQ ID NO: 13701):EPLT-AA¹⁷-LYY (SEQ ID NO: 13803), SIPKAXXVPTEL (SEQ ID NO: 13773):EPLT-AA¹⁷-LYY (SEQ ID NO: 13803), HVTKPTXAPTKL (SEQ ID NO: 13721):EPLT-AA¹⁷-LYY (SEQ ID NO: 13803), YVPKPXXAPTKL (SEQ ID NO: 13793):EPLT-AA¹⁷-LYY (SEQ ID NO: 13803), TVPKPXXAPTQL (SEQ ID NO: 13785):EPLT-AA¹⁷-LYY (SEQ ID NO: 13803), AVPKAXXAPTKL (SEQ ID NO: 13689):EPLT-AA¹⁷-LYY (SEQ ID NO: 13803), KVGKAXXVPTKL (SEQ ID NO: 13753):EPLT-AA¹⁷-LYY (SEQ ID NO: 13803), KASKAXXVPTKL (SEQ ID NO: 13737):EPLT-AA¹⁷-LYY (SEQ ID NO: 13803), GSAGPXXTPTKM (SEQ ID NO: 13707):EPLT-AA¹⁷-LYY (SEQ ID NO: 13803), AAPASXXVPARL (SEQ ID NO: 13668):EPLT-AA¹⁷-LYY (SEQ ID NO: 13803), STPPTXXVPTRL (SEQ ID NO: 13783):EPLT-AA¹⁷-LYY (SEQ ID NO: 13803), HVPKPXXAPTKL (SEQ ID NO: 13713):EPLT-AA¹⁷-LYY (SEQ ID NO: 13803), RVPSTXXAPVKT (SEQ ID NO: 13760):EPLT-AA¹⁷-LYY (SEQ ID NO: 13803), ASAAPXXVPQAL (SEQ ID NO: 13678):EPLT-AA¹⁷-LYY (SEQ ID NO: 13803), NDEGLEXVPTEE (SEQ ID NO: 13755):EPLT-AA¹⁷-LYY (SEQ ID NO: 13803), NDEGLEXVPTGQ (SEQ ID NO: 13756):EPLT-AA¹⁷-LYY (SEQ ID NO: 13803), SSVKXQPSRVHH (SEQ ID NO: 13775):EPLT-AA¹⁷-LYY (SEQ ID NO: 13803), RNVQXRPTQVQL (SEQ ID NO: 13758):EPLT-AA¹⁷-LYY (SEQ ID NO: 13803), KIPKAXXVPQEL (SEQ ID NO: 13744):EPLT-AA¹⁷-LYY (SEQ ID NO: 13803), GIPEPXXVPQKM (SEQ ID NO: 13702):EPLT-AA¹⁷-LYY (SEQ ID NO: 13803), SIPKAXXVPQEL (SEQ ID NO: 13772):EPLT-AA¹⁷-LYY (SEQ ID NO: 13803), HVTKPTXVPQKL (SEQ ID NO: 13728):EPLT-AA¹⁷-LYY (SEQ ID NO: 13803), YVPKPXXVPQKL (SEQ ID NO: 13798):EPLT-AA¹⁷-LYY (SEQ ID NO: 13803), TVPKPXXVPQQL (SEQ ID NO: 13790):EPLT-AA¹⁷-LYY (SEQ ID NO: 13803), AVPKAXXVPQKL (SEQ ID NO: 13694):EPLT-AA¹⁷-LYY (SEQ ID NO: 13803), KVGKAXXVPQKL (SEQ ID NO: 13752):EPLT-AA¹⁷-LYY (SEQ ID NO: 13803), KASKAXXVPQKL (SEQ ID NO: 13736):EPLT-AA¹⁷-LYY (SEQ ID NO: 13803), GSAGPXXVPQKM (SEQ ID NO: 13710):EPLT-AA¹⁷-LYY (SEQ ID NO: 13803), AAPASXXVPQRL (SEQ ID NO: 13670):EPLT-AA¹⁷-LYY (SEQ ID NO: 13803), STPPTXXVPQRL (SEQ ID NO: 13782):EPLT-AA¹⁷-LYY (SEQ ID NO: 13803), HVPKPXXVPQKL (SEQ ID NO: 13718):EPLT-AA¹⁷-LYY (SEQ ID NO: 13803), RVPSTXXVPQKT (SEQ ID NO: 13764):EPLT-AA¹⁷-LYY (SEQ ID NO: 13803), ASASPXXVPQDL (SEQ ID NO: 13686):EPLT-AA¹⁷-LYY (SEQ ID NO: 13803), NDEGLEXVPTGQ (SEQ ID NO: 13756):SNIT-AA¹⁷-QIM (SEQ ID NO: 13810), GIPEPXXVPEKM (SEQ ID NO: 13701):SNIT-AA¹⁷-QIM (SEQ ID NO: 13810), HVTKPTXAPTKL (SEQ ID NO: 13721):SNIT-AA¹⁷-QIM (SEQ ID NO: 13810), YVPKPXXAPTKL (SEQ ID NO: 13793):SNIT-AA¹⁷-QIM (SEQ ID NO: 13810), TVPKPXXAPTQL (SEQ ID NO: 13785):SNIT-AA¹⁷-QIM (SEQ ID NO: 13810), AVPKAXXAPTKL (SEQ ID NO: 13689):SNIT-AA¹⁷-QIM (SEQ ID NO: 13810), GSAGPXXTPTKM (SEQ ID NO: 13707):SNIT-AA¹⁷-QIM (SEQ ID NO: 13810), AAPASXXVPARL (SEQ ID NO: 13668):SNIT-AA¹⁷-QIM (SEQ ID NO: 13810), HVPKPXXAPTKL (SEQ ID NO: 13713):SNIT-AA¹⁷-QIM (SEQ ID NO: 13810), RVPSTXXAPVKT (SEQ ID NO: 13760):SNIT-AA¹⁷-QIM (SEQ ID NO: 13810), ASAAPXXVPQAL (SEQ ID NO: 13678):SNIT-AA¹⁷-QIM (SEQ ID NO: 13810), ASASPXXVSQDL (SEQ ID NO: 13688):SNIT-AA¹⁷-QIM (SEQ ID NO: 13810), ASASPXXVPQDL (SEQ ID NO: 13686):SNIT-AA¹⁷-QIM (SEQ ID NO: 13810), SSVKXQPSRVHH (SEQ ID NO: 13775):SNIT-AA¹⁷-QIM (SEQ ID NO: 13810), RNVQXRPTQVQL (SEQ ID NO: 13758):SNIT-AA¹⁷-QIM (SEQ ID NO: 13810), RNVQXRPSRVQL (SEQ ID NO: 13757):RSVK-AA¹⁷-AKV (SEQ ID NO: 13807), KIPKAXXVPTEL (SEQ ID NO: 13745):RSVK-AA¹⁷-AKV (SEQ ID NO: 13807), GIPEPXXVPEKM (SEQ ID NO: 13701):RSVK-AA¹⁷-AKV (SEQ ID NO: 13807), SIPKAXXVPTEL (SEQ ID NO: 13773):RSVK-AA¹⁷-AKV (SEQ ID NO: 13807), HVTKPTXAPTKL (SEQ ID NO: 13721):RSVK-AA¹⁷-AKV (SEQ ID NO: 13807), YVPKPXXAPTKL (SEQ ID NO: 13793):RSVK-AA¹⁷-AKV (SEQ ID NO: 13807), TVPKPXXAPTQL (SEQ ID NO: 13785):RSVK-AA¹⁷-AKV (SEQ ID NO: 13807), AVPKAXXAPTKL (SEQ ID NO: 13689):RSVK-AA¹⁷-AKV (SEQ ID NO: 13807), KVGKAXXVPTKL (SEQ ID NO: 13753):RSVK-AA¹⁷-AKV (SEQ ID NO: 13807), KASKAXXVPTKL (SEQ ID NO: 13737):RSVK-AA¹⁷-AKV (SEQ ID NO: 13807), GSAGPXXTPTKM (SEQ ID NO: 13707):RSVK-AA¹⁷-AKV (SEQ ID NO: 13807), AAPASXXVPARL (SEQ ID NO: 13668):RSVK-AA¹⁷-AKV (SEQ ID NO: 13807), STPPTXXVPTRL (SEQ ID NO: 13783):RSVK-AA¹⁷-AKV (SEQ ID NO: 13807), HVPKPXXAPTKL (SEQ ID NO: 13713):RSVK-AA¹⁷-AKV (SEQ ID NO: 13807), RVPSTXXAPVKT (SEQ ID NO: 13760):RSVK-AA¹⁷-AKV (SEQ ID NO: 13807), ASAAPXXVPQAL (SEQ ID NO: 13678):RSVK-AA¹⁷-AKV (SEQ ID NO: 13807), ASASPXXVSQDL (SEQ ID NO: 13688):RSVK-AA¹⁷-AKV (SEQ ID NO: 13807), ASASPXXVPQDL (SEQ ID NO: 13686):RSVK-AA¹⁷-AKV (SEQ ID NO: 13807), NDEGLEXVPTEE (SEQ ID NO: 13755):RSVK-AA¹⁷-AKV (SEQ ID NO: 13807), NDEGLEXVPTGQ (SEQ ID NO: 13756):RSVK-AA¹⁷-AKV (SEQ ID NO: 13807), RNVQXRPTQVQL (SEQ ID NO: 13758):RSVK-AA¹⁷-AKV (SEQ ID NO: 13807), SSVKXQPTQVHH (SEQ ID NO: 13776):RPVQ-AA¹⁷-RKI (SEQ ID NO: 13806), KIPKAXXVPTEL (SEQ ID NO: 13745):RPVQ-AA¹⁷-RKI (SEQ ID NO: 13806), GIPEPXXVPEKM (SEQ ID NO: 13701):RPVQ-AA¹⁷-RKI (SEQ ID NO: 13806), SIPKAXXVPTEL (SEQ ID NO: 13773):RPVQ-AA¹⁷-RKI (SEQ ID NO: 13806), HVTKPTXAPTKL (SEQ ID NO: 13721):RPVQ-AA¹⁷-RKI (SEQ ID NO: 13806), YVPKPXXAPTKL (SEQ ID NO: 13793):RPVQ-AA¹⁷-RKI (SEQ ID NO: 13806), TVPKPXXAPTQL (SEQ ID NO: 13785):RPVQ-AA¹⁷-RKI (SEQ ID NO: 13806), AVPKAXXAPTKL (SEQ ID NO: 13689):RPVQ-AA¹⁷-RKI (SEQ ID NO: 13806), KVGKAXXVPTKL (SEQ ID NO: 13753):RPVQ-AA¹⁷-RKI (SEQ ID NO: 13806), KASKAXXVPTKL (SEQ ID NO: 13737):RPVQ-AA¹⁷-RKI (SEQ ID NO: 13806), GSAGPXXTPTKM (SEQ ID NO: 13707):RPVQ-AA¹⁷-RKI (SEQ ID NO: 13806), AAPASXXVPARL (SEQ ID NO: 13668):RPVQ-AA¹⁷-RKI (SEQ ID NO: 13806), STPPTXXVPTRL (SEQ ID NO: 13783):RPVQ-AA¹⁷-RKI (SEQ ID NO: 13806), HVPKPXXAPTKL (SEQ ID NO: 13713):RPVQ-AA¹⁷-RKI (SEQ ID NO: 13806), RVPSTXXAPVKT (SEQ ID NO: 13760):RPVQ-AA¹⁷-RKI (SEQ ID NO: 13806), ASAAPXXVPQAL (SEQ ID NO: 13678):RPVQ-AA¹⁷-RKI (SEQ ID NO: 13806), ASASPXXVSQDL (SEQ ID NO: 13688):RPVQ-AA¹⁷-RKI (SEQ ID NO: 13806), ASASPXXVPQDL (SEQ ID NO: 13686):RPVQ-AA¹⁷-RKI (SEQ ID NO: 13806), NDEGLEXVPTEE (SEQ ID NO: 13755):RPVQ-AA¹⁷-RKI (SEQ ID NO: 13806), NDEGLEXVPTGQ (SEQ ID NO: 13756):RPVQ-AA¹⁷-RKI (SEQ ID NO: 13806) and SSVKXQPSRVHH (SEQ ID NO: 13775):RPVQ-AA¹⁷-RKI (SEQ ID NO: 13806); and wherein AA¹⁷ is selected from the group consisting of G, A, V, L, I, P, F, M, W, T and S (in particular is selected from the group consisting of M, I, L, V and T).

[0382] In certain embodiments, the triplet PEP7:PEP3:PEP1 is selected from the group consisting of GIPEPXX (SEQ ID NO: 13650):VPT:SAIS (SEQ ID NO: 13570), HVTKPTX (SEQ ID NO: 13653):VPT:SAIS (SEQ ID NO: 13570), YVPKPXX (SEQ ID NO: 13664):VPT:SAIS (SEQ ID NO: 13570), TVPKPXX (SEQ ID NO: 13663):VPT:SAIS (SEQ ID NO: 13570), AVPKAXX (SEQ ID NO: 13649):VPT:SAIS (SEQ ID NO: 13570), KVGKAXX (SEQ ID NO: 13656):VPT:SAIS (SEQ ID NO: 13570), KASKAXX (SEQ ID NO: 13654):VPT:SAIS (SEQ ID NO: 13570), GSAGPXX (SEQ ID NO: 13651):VPT:SAIS (SEQ ID NO: 13570), AAPASXX (SEQ ID NO: 13646):VPT:SAIS (SEQ ID NO: 13570), STPPTXX (SEQ ID NO: 13662):VPT:SAIS (SEQ ID NO: 13570), HVPKPXX (SEQ ID NO: 13652):VPT:SAIS (SEQ ID NO: 13570), RVPSTXX (SEQ ID NO: 13659):VPT:SAIS (SEQ ID NO: 13570), ASAAPXX (SEQ ID NO: 13647):VPT:SAIS (SEQ ID NO: 13570), ASASPXX (SEQ ID NO: 13648):VPT:SAIS (SEQ ID NO: 13570), GIPEPXX (SEQ ID NO: 13650):VPE:SAIS (SEQ ID NO: 13570), HVTKPTX (SEQ ID NO: 13653):APT:SAIS (SEQ ID NO: 13570), YVPKPXX (SEQ ID NO: 13664):APT:SAIS (SEQ ID NO: 13570), TVPKPXX (SEQ ID NO: 13663):APT:SAIS (SEQ ID NO: 13570), AVPKAXX (SEQ ID NO: 13649):APT:SAIS (SEQ ID NO: 13570), GSAGPXX (SEQ ID NO: 13651):TPT:SAIS (SEQ ID NO: 13570), AAPASXX (SEQ ID NO: 13646):VPA:SAIS (SEQ ID NO: 13570), HVPKPXX (SEQ ID NO: 13652):APT:SAIS (SEQ ID NO: 13570), RVPSTXX (SEQ ID NO: 13659):APV:SAIS (SEQ ID NO: 13570), ASAAPXX (SEQ ID NO: 13647):VPQ:SAIS (SEQ ID NO: 13570), ASASPXX (SEQ ID NO: 13648):VSQ:SAIS (SEQ ID NO: 13570), ASASPXX (SEQ ID NO: 13648):VPQ:SAIS (SEQ ID NO: 13570), SSVKXQP (SEQ ID NO: 13661):SRV:SAIS (SEQ ID NO: 13570), RNVQXRP (SEQ ID NO: 13658):TQV:SAIS (SEQ ID NO: 13570), KIPKAXX (SEQ ID NO: 13655):VPE:SSLS (SEQ ID NO: 13575), SIPKAXX (SEQ ID NO: 13660):VPE:SSLS (SEQ ID NO: 13575), HVTKPTX (SEQ ID NO: 13653):VPE:SSLS (SEQ ID NO: 13575), YVPKPXX (SEQ ID NO: 13664):VPE:SSLS (SEQ ID NO: 13575), TVPKPXX (SEQ ID NO: 13663):VPE:SSLS (SEQ ID NO: 13575), AVPKAXX (SEQ ID NO: 13649):VPE:SSLS (SEQ ID NO: 13575), KVGKAXX (SEQ ID NO: 13656):VPE:SSLS (SEQ ID NO: 13575), KASKAXX (SEQ ID NO: 13654):VPE:SSLS (SEQ ID NO: 13575), GSAGPXX (SEQ ID NO: 13651):VPE:SSLS (SEQ ID NO: 13575), AAPASXX (SEQ ID NO: 13646):VPE:SSLS (SEQ ID NO: 13575), STPPTXX (SEQ ID NO: 13662):VPE:SSLS (SEQ ID NO: 13575), HVPKPXX (SEQ ID NO: 13652):VPE:SSLS (SEQ ID NO: 13575), RVPSTXX (SEQ ID NO: 13659):VPE:SSLS (SEQ ID NO: 13575), ASAAPXX (SEQ ID NO: 13647):VPE:SSLS (SEQ ID NO: 13575), ASASPXX (SEQ ID NO: 13648):VPE:SSLS (SEQ ID NO: 13575), KIPKAXX (SEQ ID NO: 13655):VPT:SSLS (SEQ ID NO: 13575), SIPKAXX (SEQ ID NO: 13660):VPT:SSLS (SEQ ID NO: 13575), HVTKPTX (SEQ ID NO: 13653):APT:SSLS (SEQ ID NO: 13575), YVPKPXX (SEQ ID NO: 13664):APT:SSLS (SEQ ID NO: 13575), TVPKPXX (SEQ ID NO: 13663):APT:SSLS (SEQ ID NO: 13575), AVPKAXX (SEQ ID NO: 13649):APT:SSLS (SEQ ID NO: 13575), KVGKAXX (SEQ ID NO: 13656):VPT:SSLS (SEQ ID NO: 13575), KASKAXX (SEQ ID NO: 13654):VPT:SSLS (SEQ ID NO: 13575), GSAGPXX (SEQ ID NO: 13651):TPT:SSLS (SEQ ID NO: 13575), AAPASXX (SEQ ID NO: 13646):VPA:SSLS (SEQ ID NO: 13575), STPPTXX (SEQ ID NO: 13662):VPT:SSLS (SEQ ID NO: 13575), HVPKPXX (SEQ ID NO: 13652):APT:SSLS (SEQ ID NO: 13575), RVPSTXX (SEQ ID NO: 13659):APV:SSLS (SEQ ID NO: 13575), ASAAPXX (SEQ ID NO: 13647):VPQ:SSLS (SEQ ID NO: 13575), ASASPXX (SEQ ID NO: 13648):VSQ:SSLS (SEQ ID NO: 13575), ASASPXX (SEQ ID NO: 13648):VPQ:SSLS (SEQ ID NO: 13575), NDEGLEX (SEQ ID NO: 13657):VPT:SSLS (SEQ ID NO: 13575), SSVKXQP (SEQ ID NO: 13661):SRV:SSLS (SEQ ID NO: 13575), RNVQXRP (SEQ ID NO: 13658):TQV:SSLS (SEQ ID NO: 13575), KIPKAXX (SEQ ID NO: 13655):APT:NAIS (SEQ ID NO: 13567), GIPEPXX (SEQ ID NO: 13650):APT:NAIS (SEQ ID NO: 13567), SIPKAXX (SEQ ID NO: 13660):APT:NAIS (SEQ ID NO: 13567), AVPKAXX (SEQ ID NO: 13649):APT:NAIS (SEQ ID NO: 13567), KVGKAXX (SEQ ID NO: 13656):APT:NAIS (SEQ ID NO: 13567), KASKAXX (SEQ ID NO: 13654):APT:NAIS (SEQ ID NO: 13567), GSAGPXX (SEQ ID NO: 13651):APT:NAIS (SEQ ID NO: 13567), AAPASXX (SEQ ID NO: 13646):APT:NAIS (SEQ ID NO: 13567), STPPTXX (SEQ ID NO: 13662):APT:NAIS (SEQ ID NO: 13567), RVPSTXX (SEQ ID NO: 13659):APT:NAIS (SEQ ID NO: 13567), ASAAPXX (SEQ ID NO: 13647):APT:NAIS (SEQ ID NO: 13567), ASASPXX (SEQ ID NO: 13648):APT:NAIS (SEQ ID NO: 13567), KIPKAXX (SEQ ID NO: 13655):VPT:NAIS (SEQ ID NO: 13567), GIPEPXX (SEQ ID NO: 13650):VPE:NAIS (SEQ ID NO: 13567), SIPKAXX (SEQ ID NO: 13660):VPT:NAIS (SEQ ID NO: 13567), KVGKAXX (SEQ ID NO: 13656):VPT:NAIS (SEQ ID NO: 13567), KASKAXX (SEQ ID NO: 13654):VPT:NAIS (SEQ ID NO: 13567), GSAGPXX (SEQ ID NO: 13651):TPT:NAIS (SEQ ID NO: 13567), AAPASXX (SEQ ID NO: 13646):VPA:NAIS (SEQ ID NO: 13567), STPPTXX (SEQ ID NO: 13662):VPT:NAIS (SEQ ID NO: 13567), RVPSTXX (SEQ ID NO: 13659):APV:NAIS (SEQ ID NO: 13567), ASAAPXX (SEQ ID NO: 13647):VPQ:NAIS (SEQ ID NO: 13567), ASASPXX (SEQ ID NO: 13648):VSQ:NAIS (SEQ ID NO: 13567), ASASPXX (SEQ ID NO: 13648):VPQ:NAIS (SEQ ID NO: 13567), NDEGLEX (SEQ ID NO: 13657):VPT:NAIS (SEQ ID NO: 13567), SSVKXQP (SEQ ID NO: 13661):SRV:NAIS (SEQ ID NO: 13567), RNVQXRP (SEQ ID NO: 13658):TQV:NAIS (SEQ ID NO: 13567), KIPKAXX (SEQ ID NO: 13655):APT:SATS (SEQ ID NO: 13571), GIPEPXX (SEQ ID NO: 13650):APT:SATS (SEQ ID NO: 13571), SIPKAXX (SEQ ID NO: 13660):APT:SATS (SEQ ID NO: 13571), HVTKPTX (SEQ ID NO: 13653):APT:SATS (SEQ ID NO: 13571), YVPKPXX (SEQ ID NO: 13664):APT:SATS (SEQ ID NO: 13571), TVPKPXX (SEQ ID NO: 13663):APT:SATS (SEQ ID NO: 13571), KVGKAXX (SEQ ID NO: 13656):APT:SATS (SEQ ID NO: 13571), KASKAXX (SEQ ID NO: 13654):APT:SATS (SEQ ID NO: 13571), GSAGPXX (SEQ ID NO: 13651):APT:SATS (SEQ ID NO: 13571), AAPASXX (SEQ ID NO: 13646):APT:SATS (SEQ ID NO: 13571), STPPTXX (SEQ ID NO: 13662):APT:SATS (SEQ ID NO: 13571), HVPKPXX (SEQ ID NO: 13652):APT:SATS (SEQ ID NO: 13571), RVPSTXX (SEQ ID NO: 13659):APT:SATS (SEQ ID NO: 13571), ASAAPXX (SEQ ID NO: 13647):APT:SATS (SEQ ID NO: 13571), ASASPXX (SEQ ID NO: 13648):APT:SATS (SEQ ID NO: 13571), KIPKAXX (SEQ ID NO: 13655):VPT:SATS (SEQ ID NO: 13571), GIPEPXX (SEQ ID NO: 13650):VPE:SATS (SEQ ID NO: 13571), SIPKAXX (SEQ ID NO: 13660):VPT:SATS (SEQ ID NO: 13571), KVGKAXX (SEQ ID NO: 13656):VPT:SATS (SEQ ID NO: 13571), KASKAXX (SEQ ID NO: 13654):VPT:SATS (SEQ ID NO: 13571), GSAGPXX (SEQ ID NO: 13651):TPT:SATS (SEQ ID NO: 13571), AAPASXX (SEQ ID NO: 13646):VPA:SATS (SEQ ID NO: 13571), STPPTXX (SEQ ID NO: 13662):VPT:SATS (SEQ ID NO: 13571), RVPSTXX (SEQ ID NO: 13659):APV:SATS (SEQ ID NO: 13571), ASAAPXX (SEQ ID NO: 13647):VPQ:SATS (SEQ ID NO: 13571), ASASPXX (SEQ ID NO: 13648):VSQ:SATS (SEQ ID NO: 13571), ASASPXX (SEQ ID NO: 13648):VPQ:SATS (SEQ ID NO: 13571), NDEGLEX (SEQ ID NO: 13657):VPT:SATS (SEQ ID NO: 13571), SSVKXQP (SEQ ID NO: 13661):SRV:SATS (SEQ ID NO: 13571), RNVQXRP (SEQ ID NO: 13658):TQV:SATS (SEQ ID NO: 13571), KIPKAXX (SEQ ID NO: 13655):VPT:SPIS (SEQ ID NO: 13574), GIPEPXX (SEQ ID NO: 13650):VPT:SPIS (SEQ ID NO: 13574), SIPKAXX (SEQ ID NO: 13660):VPT:SPIS (SEQ ID NO: 13574), HVTKPTX (SEQ ID NO: 13653):VPT:SPIS (SEQ ID NO: 13574), YVPKPXX (SEQ ID NO: 13664):VPT:SPIS (SEQ ID NO: 13574), TVPKPXX (SEQ ID NO: 13663):VPT:SPIS (SEQ ID NO: 13574), AVPKAXX (SEQ ID NO: 13649):VPT:SPIS (SEQ ID NO: 13574), KASKAXX (SEQ ID NO: 13654):VPT:SPIS (SEQ ID NO: 13574), GSAGPXX (SEQ ID NO: 13651):VPT:SPIS (SEQ ID NO: 13574), AAPASXX (SEQ ID NO: 13646):VPT:SPIS (SEQ ID NO: 13574), STPPTXX (SEQ ID NO: 13662):VPT:SPIS (SEQ ID NO: 13574), HVPKPXX (SEQ ID NO: 13652):VPT:SPIS (SEQ ID NO: 13574), RVPSTXX (SEQ ID NO: 13659):VPT:SPIS (SEQ ID NO: 13574), ASAAPXX (SEQ ID NO: 13647):VPT:SPIS (SEQ ID NO: 13574), ASASPXX (SEQ ID NO: 13648):VPT:SPIS (SEQ ID NO: 13574), GIPEPXX (SEQ ID NO: 13650):VPE:SPIS (SEQ ID NO: 13574), HVTKPTX (SEQ ID NO: 13653):APT:SPIS (SEQ ID NO: 13574), YVPKPXX (SEQ ID NO: 13664):APT:SPIS (SEQ ID NO: 13574), TVPKPXX (SEQ ID NO: 13663):APT:SPIS (SEQ ID NO: 13574), AVPKAXX (SEQ ID NO: 13649):APT:SPIS (SEQ ID NO: 13574), GSAGPXX (SEQ ID NO: 13651):TPT:SPIS (SEQ ID NO: 13574), AAPASXX (SEQ ID NO: 13646):VPA:SPIS (SEQ ID NO: 13574), HVPKPXX (SEQ ID NO: 13652):APT:SPIS (SEQ ID NO: 13574), RVPSTXX (SEQ ID NO: 13659):APV:SPIS (SEQ ID NO: 13574), ASAAPXX (SEQ ID NO: 13647):VPQ:SPIS (SEQ ID NO: 13574), ASASPXX (SEQ ID NO: 13648):VSQ:SPIS (SEQ ID NO: 13574), ASASPXX (SEQ ID NO: 13648):VPQ:SPIS (SEQ ID NO: 13574), SSVKXQP (SEQ ID NO: 13661):SRV:SPIS (SEQ ID NO: 13574), RNVQXRP (SEQ ID NO: 13658):TQV:SPIS (SEQ ID NO: 13574), KIPKAXX (SEQ ID NO: 13655):VPT:EPIS (SEQ ID NO: 13563), GIPEPXX (SEQ ID NO: 13650):VPT:EPIS (SEQ ID NO: 13563), SIPKAXX (SEQ ID NO: 13660):VPT:EPIS (SEQ ID NO: 13563), HVTKPTX (SEQ ID NO: 13653):VPT:EPIS (SEQ ID NO: 13563), YVPKPXX (SEQ ID NO: 13664):VPT:EPIS (SEQ ID NO: 13563), TVPKPXX (SEQ ID NO: 13663):VPT:EPIS (SEQ ID NO: 13563), AVPKAXX (SEQ ID NO: 13649):VPT:EPIS (SEQ ID NO: 13563), KVGKAXX (SEQ ID NO: 13656):VPT:EPIS (SEQ ID NO: 13563), GSAGPXX (SEQ ID NO: 13651):VPT:EPIS (SEQ ID NO: 13563), AAPASXX (SEQ ID NO: 13646):VPT:EPIS (SEQ ID NO: 13563), STPPTXX (SEQ ID NO: 13662):VPT:EPIS (SEQ ID NO: 13563), HVPKPXX (SEQ ID NO: 13652):VPT:EPIS (SEQ ID NO: 13563), RVPSTXX (SEQ ID NO: 13659):VPT:EPIS (SEQ ID NO: 13563), ASAAPXX (SEQ ID NO: 13647):VPT:EPIS (SEQ ID NO: 13563), ASASPXX (SEQ ID NO: 13648):VPT:EPIS (SEQ ID NO: 13563), GIPEPXX (SEQ ID NO: 13650):VPE:EPIS (SEQ ID NO: 13563), HVTKPTX (SEQ ID NO: 13653):APT:EPIS (SEQ ID NO: 13563), YVPKPXX (SEQ ID NO: 13664):APT:EPIS (SEQ ID NO: 13563), TVPKPXX (SEQ ID NO: 13663):APT:EPIS (SEQ ID NO: 13563), AVPKAXX (SEQ ID NO: 13649):APT:EPIS (SEQ ID NO: 13563), GSAGPXX (SEQ ID NO: 13651):TPT:EPIS (SEQ ID NO: 13563), AAPASXX (SEQ ID NO: 13646):VPA:EPIS (SEQ ID NO: 13563), HVPKPXX (SEQ ID NO: 13652):APT:EPIS (SEQ ID NO: 13563), RVPSTXX (SEQ ID NO: 13659):APV:EPIS (SEQ ID NO: 13563), ASAAPXX (SEQ ID NO: 13647):VPQ:EPIS (SEQ ID NO: 13563), ASASPXX (SEQ ID NO: 13648):VSQ:EPIS (SEQ ID NO: 13563), ASASPXX (SEQ ID NO: 13648):VPQ:EPIS (SEQ ID NO: 13563), SSVKXQP (SEQ ID NO: 13661):SRV:EPIS (SEQ ID NO: 13563), RNVQXRP (SEQ ID NO: 13658):TQV:EPIS (SEQ ID NO: 13563), KIPKAXX (SEQ ID NO: 13655):TPT:SPIN (SEQ ID NO: 13573), GIPEPXX (SEQ ID NO: 13650):TPT:SPIN (SEQ ID NO: 13573), SIPKAXX (SEQ ID NO: 13660):TPT:SPIN (SEQ ID NO: 13573), HVTKPTX (SEQ ID NO: 13653):TPT:SPIN (SEQ ID NO: 13573), YVPKPXX (SEQ ID NO: 13664):TPT:SPIN (SEQ ID NO: 13573), TVPKPXX (SEQ ID NO: 13663):TPT:SPIN (SEQ ID NO: 13573), AVPKAXX (SEQ ID NO: 13649):TPT:SPIN (SEQ ID NO: 13573), KVGKAXX (SEQ ID NO: 13656):TPT:SPIN (SEQ ID NO: 13573), KASKAXX (SEQ ID NO: 13654):TPT:SPIN (SEQ ID NO: 13573), AAPASXX (SEQ ID NO: 13646):TPT:SPIN (SEQ ID NO: 13573), STPPTXX (SEQ ID NO: 13662):TPT:SPIN (SEQ ID NO: 13573), HVPKPXX (SEQ ID NO: 13652):TPT:SPIN (SEQ ID NO: 13573), RVPSTXX (SEQ ID NO: 13659):TPT:SPIN (SEQ ID NO: 13573), ASAAPXX (SEQ ID NO: 13647):TPT:SPIN (SEQ ID NO: 13573), ASASPXX (SEQ ID NO: 13648):TPT:SPIN (SEQ ID NO: 13573), KIPKAXX (SEQ ID NO: 13655):VPT:SPIN (SEQ ID NO: 13573), GIPEPXX (SEQ ID NO: 13650):VPE:SPIN (SEQ ID NO: 13573), SIPKAXX (SEQ ID NO: 13660):VPT:SPIN (SEQ ID NO: 13573), HVTKPTX (SEQ ID NO: 13653):APT:SPIN (SEQ ID NO: 13573), YVPKPXX (SEQ ID NO: 13664):APT:SPIN (SEQ ID NO: 13573), TVPKPXX (SEQ ID NO: 13663):APT:SPIN (SEQ ID NO: 13573), AVPKAXX (SEQ ID NO: 13649):APT:SPIN (SEQ ID NO: 13573), KVGKAXX (SEQ ID NO: 13656):VPT:SPIN (SEQ ID NO: 13573), KASKAXX (SEQ ID NO: 13654):VPT:SPIN (SEQ ID NO: 13573), AAPASXX (SEQ ID NO: 13646):VPA:SPIN (SEQ ID NO: 13573), STPPTXX (SEQ ID NO: 13662):VPT:SPIN (SEQ ID NO: 13573), HVPKPXX (SEQ ID NO: 13652):APT:SPIN (SEQ ID NO: 13573), RVPSTXX (SEQ ID NO: 13659):APV:SPIN (SEQ ID NO: 13573), ASAAPXX (SEQ ID NO: 13647):VPQ:SPIN (SEQ ID NO: 13573), ASASPXX (SEQ ID NO: 13648):VSQ:SPIN (SEQ ID NO: 13573), ASASPXX (SEQ ID NO: 13648):VPQ:SPIN (SEQ ID NO: 13573), NDEGLEX (SEQ ID NO: 13657):VPT:SPIN (SEQ ID NO: 13573), SSVKXQP (SEQ ID NO: 13661):SRV:SPIN (SEQ ID NO: 13573), RNVQXRP (SEQ ID NO: 13658):TQV:SPIN (SEQ ID NO: 13573), KIPKAXX (SEQ ID NO: 13655):VPA:SPIS (SEQ ID NO: 13574), GIPEPXX (SEQ ID NO: 13650):VPA:SPIS (SEQ ID NO: 13574), SIPKAXX (SEQ ID NO: 13660):VPA:SPIS (SEQ ID NO: 13574), HVTKPTX (SEQ ID NO: 13653):VPA:SPIS (SEQ ID NO: 13574), YVPKPXX (SEQ ID NO: 13664):VPA:SPIS (SEQ ID NO: 13574), TVPKPXX (SEQ ID NO: 13663):VPA:SPIS (SEQ ID NO: 13574), AVPKAXX (SEQ ID NO: 13649):VPA:SPIS (SEQ ID NO: 13574), KVGKAXX (SEQ ID NO: 13656):VPA:SPIS (SEQ ID NO: 13574), KASKAXX (SEQ ID NO: 13654):VPA:SPIS (SEQ ID NO: 13574), GSAGPXX (SEQ ID NO: 13651):VPA:SPIS (SEQ ID NO: 13574), STPPTXX (SEQ ID NO: 13662):VPA:SPIS (SEQ ID NO: 13574), HVPKPXX (SEQ ID NO: 13652):VPA:SPIS (SEQ ID NO: 13574), RVPSTXX (SEQ ID NO: 13659):VPA:SPIS (SEQ ID NO: 13574), ASAAPXX (SEQ ID NO: 13647):VPA:SPIS (SEQ ID NO: 13574), ASASPXX (SEQ ID NO: 13648):VPA:SPIS (SEQ ID NO: 13574), KVGKAXX (SEQ ID NO: 13656):VPT:SPIS (SEQ ID NO: 13574), NDEGLEX (SEQ ID NO: 13657):VPT:SPIS (SEQ ID NO: 13574), KIPKAXX (SEQ ID NO: 13655):APV:KPLS (SEQ ID NO: 13566), GIPEPXX (SEQ ID NO: 13650):APV:KPLS (SEQ ID NO: 13566), SIPKAXX (SEQ ID NO: 13660):APV:KPLS (SEQ ID NO: 13566), HVTKPTX (SEQ ID NO: 13653):APV:KPLS (SEQ ID NO: 13566), YVPKPXX (SEQ ID NO: 13664):APV:KPLS (SEQ ID NO: 13566), TVPKPXX (SEQ ID NO: 13663):APV:KPLS (SEQ ID NO: 13566), AVPKAXX (SEQ ID NO: 13649):APV:KPLS (SEQ ID NO: 13566), KVGKAXX (SEQ ID NO: 13656):APV:KPLS (SEQ ID NO: 13566), KASKAXX (SEQ ID NO: 13654):APV:KPLS (SEQ ID NO: 13566), GSAGPXX (SEQ ID NO: 13651):APV:KPLS (SEQ ID NO: 13566), AAPASXX (SEQ ID NO: 13646):APV:KPLS (SEQ ID NO: 13566), STPPTXX (SEQ ID NO: 13662):APV:KPLS (SEQ ID NO: 13566), HVPKPXX (SEQ ID NO: 13652):APV:KPLS (SEQ ID NO: 13566), ASAAPXX (SEQ ID NO: 13647):APV:KPLS (SEQ ID NO: 13566), ASASPXX (SEQ ID NO: 13648):APV:KPLS (SEQ ID NO: 13566), KIPKAXX (SEQ ID NO: 13655):VPT:KPLS (SEQ ID NO: 13566), GIPEPXX (SEQ ID NO: 13650):VPE:KPLS (SEQ ID NO: 13566), SIPKAXX (SEQ ID NO: 13660):VPT:KPLS (SEQ ID NO: 13566), HVTKPTX (SEQ ID NO: 13653):APT:KPLS (SEQ ID NO: 13566), YVPKPXX (SEQ ID NO: 13664):APT:KPLS (SEQ ID NO: 13566), TVPKPXX (SEQ ID NO: 13663):APT:KPLS (SEQ ID NO: 13566), AVPKAXX (SEQ ID NO: 13649):APT:KPLS (SEQ ID NO: 13566), KVGKAXX (SEQ ID NO: 13656):VPT:KPLS (SEQ ID NO: 13566), KASKAXX (SEQ ID NO: 13654):VPT:KPLS (SEQ ID NO: 13566), GSAGPXX (SEQ ID NO: 13651):TPT:KPLS (SEQ ID NO: 13566), AAPASXX (SEQ ID NO: 13646):VPA:KPLS (SEQ ID NO: 13566), STPPTXX (SEQ ID NO: 13662):VPT:KPLS (SEQ ID NO: 13566), HVPKPXX (SEQ ID NO: 13652):APT:KPLS (SEQ ID NO: 13566), ASAAPXX (SEQ ID NO: 13647):VPQ:KPLS (SEQ ID NO: 13566), ASASPXX (SEQ ID NO: 13648):VSQ:KPLS (SEQ ID NO: 13566), ASASPXX (SEQ ID NO: 13648):VPQ:KPLS (SEQ ID NO: 13566), NDEGLEX (SEQ ID NO: 13657):VPT:KPLS (SEQ ID NO: 13566), SSVKXQP (SEQ ID NO: 13661):SRV:KPLS (SEQ ID NO: 13566), RNVQXRP (SEQ ID NO: 13658):TQV:KPLS (SEQ ID NO: 13566), KIPKAXX (SEQ ID NO: 13655):VPQ:EPLP (SEQ ID NO: 13564), GIPEPXX (SEQ ID NO: 13650):VPQ:EPLP (SEQ ID NO: 13564), SIPKAXX (SEQ ID NO: 13660):VPQ:EPLP (SEQ ID NO: 13564), HVTKPTX (SEQ ID NO: 13653):VPQ:EPLP (SEQ ID NO: 13564), YVPKPXX (SEQ ID NO: 13664):VPQ:EPLP (SEQ ID NO: 13564), TVPKPXX (SEQ ID NO: 13663):VPQ:EPLP (SEQ ID NO: 13564), AVPKAXX (SEQ ID NO: 13649):VPQ:EPLP (SEQ ID NO: 13564), KVGKAXX (SEQ ID NO: 13656):VPQ:EPLP (SEQ ID NO: 13564), KASKAXX (SEQ ID NO: 13654):VPQ:EPLP (SEQ ID NO: 13564), GSAGPXX (SEQ ID NO: 13651):VPQ:EPLP (SEQ ID NO: 13564), AAPASXX (SEQ ID NO: 13646):VPQ:EPLP (SEQ ID NO: 13564), STPPTXX (SEQ ID NO: 13662):VPQ:EPLP (SEQ ID NO: 13564), HVPKPXX (SEQ ID NO: 13652):VPQ:EPLP (SEQ ID NO: 13564), RVPSTXX (SEQ ID NO: 13659):VPQ:EPLP (SEQ ID NO: 13564), ASASPXX (SEQ ID NO: 13648):VPQ:EPLP (SEQ ID NO: 13564), KIPKAXX (SEQ ID NO: 13655):VPT:EPLP (SEQ ID NO: 13564), GIPEPXX (SEQ ID NO: 13650):VPE:EPLP (SEQ ID NO: 13564), SIPKAXX (SEQ ID NO: 13660):VPT:EPLP (SEQ ID NO: 13564), HVTKPTX (SEQ ID NO: 13653):APT:EPLP (SEQ ID NO: 13564), YVPKPXX (SEQ ID NO: 13664):APT:EPLP (SEQ ID NO: 13564), TVPKPXX (SEQ ID NO: 13663):APT:EPLP (SEQ ID NO: 13564), AVPKAXX (SEQ ID NO: 13649):APT:EPLP (SEQ ID NO: 13564), KVGKAXX (SEQ ID NO: 13656):VPT:EPLP (SEQ ID NO: 13564), KASKAXX (SEQ ID NO: 13654):VPT:EPLP (SEQ ID NO: 13564), GSAGPXX (SEQ ID NO: 13651):TPT:EPLP (SEQ ID NO: 13564), AAPASXX (SEQ ID NO: 13646):VPA:EPLP (SEQ ID NO: 13564), STPPTXX (SEQ ID NO: 13662):VPT:EPLP (SEQ ID NO: 13564), HVPKPXX (SEQ ID NO: 13652):APT:EPLP (SEQ ID NO: 13564), RVPSTXX (SEQ ID NO: 13659):APV:EPLP (SEQ ID NO: 13564), ASASPXX (SEQ ID NO: 13648):VSQ:EPLP (SEQ ID NO: 13564), NDEGLEX (SEQ ID NO: 13657):VPT:EPLP (SEQ ID NO: 13564), SSVKXQP (SEQ ID NO: 13661):SRV:EPLP (SEQ ID NO: 13564), RNVQXRP (SEQ ID NO: 13658):TQV:EPLP (SEQ ID NO: 13564), KIPKAXX (SEQ ID NO: 13655):VSQ:EPLT (SEQ ID NO: 13565), GIPEPXX (SEQ ID NO: 13650):VSQ:EPLT (SEQ ID NO: 13565), SIPKAXX (SEQ ID NO: 13660):VSQ:EPLT (SEQ ID NO: 13565), HVTKPTX (SEQ ID NO: 13653):VSQ:EPLT (SEQ ID NO: 13565), YVPKPXX (SEQ ID NO: 13664):VSQ:EPLT (SEQ ID NO: 13565), TVPKPXX (SEQ ID NO: 13663):VSQ:EPLT (SEQ ID NO: 13565), AVPKAXX (SEQ ID NO: 13649):VSQ:EPLT (SEQ ID NO: 13565), KVGKAXX (SEQ ID NO: 13656):VSQ:EPLT (SEQ ID NO: 13565), KASKAXX (SEQ ID NO: 13654):VSQ:EPLT (SEQ ID NO: 13565), GSAGPXX (SEQ ID NO: 13651):VSQ:EPLT (SEQ ID NO: 13565), AAPASXX (SEQ ID NO: 13646):VSQ:EPLT (SEQ ID NO: 13565), STPPTXX (SEQ ID NO: 13662):VSQ:EPLT (SEQ ID NO: 13565), HVPKPXX (SEQ ID NO: 13652):VSQ:EPLT (SEQ ID NO: 13565), RVPSTXX (SEQ ID NO: 13659):VSQ:EPLT (SEQ ID NO: 13565), ASAAPXX (SEQ ID NO: 13647):VSQ:EPLT (SEQ ID NO: 13565), ASASPXX (SEQ ID NO: 13648):VSQ:EPLT (SEQ ID NO: 13565), KIPKAXX (SEQ ID NO: 13655):VPT:EPLT (SEQ ID NO: 13565), GIPEPXX (SEQ ID NO: 13650):VPE:EPLT (SEQ ID NO: 13565), SIPKAXX (SEQ ID NO: 13660):VPT:EPLT (SEQ ID NO: 13565), HVTKPTX (SEQ ID NO: 13653):APT:EPLT (SEQ ID NO: 13565), YVPKPXX (SEQ ID NO: 13664):APT:EPLT (SEQ ID NO: 13565), TVPKPXX (SEQ ID NO: 13663):APT:EPLT (SEQ ID NO: 13565), AVPKAXX (SEQ ID NO: 13649):APT:EPLT (SEQ ID NO: 13565), KVGKAXX (SEQ ID NO: 13656):VPT:EPLT (SEQ ID NO: 13565), KASKAXX (SEQ ID NO: 13654):VPT:EPLT (SEQ ID NO: 13565), GSAGPXX (SEQ ID NO: 13651):TPT:EPLT (SEQ ID NO: 13565), AAPASXX (SEQ ID NO: 13646):VPA:EPLT (SEQ ID NO: 13565), STPPTXX (SEQ ID NO: 13662):VPT:EPLT (SEQ ID NO: 13565), HVPKPXX (SEQ ID NO: 13652):APT:EPLT (SEQ ID NO: 13565), RVPSTXX (SEQ ID NO: 13659):APV:EPLT (SEQ ID NO: 13565), ASAAPXX (SEQ ID NO: 13647):VPQ:EPLT (SEQ ID NO: 13565), NDEGLEX (SEQ ID NO: 13657):VPT:EPLT (SEQ ID NO: 13565), SSVKXQP (SEQ ID NO: 13661):SRV:EPLT (SEQ ID NO: 13565), RNVQXRP (SEQ ID NO: 13658):TQV:EPLT (SEQ ID NO: 13565), KIPKAXX (SEQ ID NO: 13655):VPQ:EPLT (SEQ ID NO: 13565), GIPEPXX (SEQ ID NO: 13650):VPQ:EPLT (SEQ ID NO: 13565), SIPKAXX (SEQ ID NO: 13660):VPQ:EPLT (SEQ ID NO: 13565), HVTKPTX (SEQ ID NO: 13653):VPQ:EPLT (SEQ ID NO: 13565), YVPKPXX (SEQ ID NO: 13664):VPQ:EPLT (SEQ ID NO: 13565), TVPKPXX (SEQ ID NO: 13663):VPQ:EPLT (SEQ ID NO: 13565), AVPKAXX (SEQ ID NO: 13649):VPQ:EPLT (SEQ ID NO: 13565), KVGKAXX (SEQ ID NO: 13656):VPQ:EPLT (SEQ ID NO: 13565), KASKAXX (SEQ ID NO: 13654):VPQ:EPLT (SEQ ID NO: 13565), GSAGPXX (SEQ ID NO: 13651):VPQ:EPLT (SEQ ID NO: 13565), AAPASXX (SEQ ID NO: 13646):VPQ:EPLT (SEQ ID NO: 13565), STPPTXX (SEQ ID NO: 13662):VPQ:EPLT (SEQ ID NO: 13565), HVPKPXX (SEQ ID NO: 13652):VPQ:EPLT (SEQ ID NO: 13565), RVPSTXX (SEQ ID NO: 13659):VPQ:EPLT (SEQ ID NO: 13565), ASASPXX (SEQ ID NO: 13648):VPQ:EPLT (SEQ ID NO: 13565), NDEGLEX (SEQ ID NO: 13657):VPT:SNIT (SEQ ID NO: 13572), GIPEPXX (SEQ ID NO: 13650):VPE:SNIT (SEQ ID NO: 13572), HVTKPTX (SEQ ID NO: 13653):APT:SNIT (SEQ ID NO: 13572), YVPKPXX (SEQ ID NO: 13664):APT:SNIT (SEQ ID NO: 13572), TVPKPXX (SEQ ID NO: 13663):APT:SNIT (SEQ ID NO: 13572), AVPKAXX (SEQ ID NO: 13649):APT:SNIT (SEQ ID NO: 13572), GSAGPXX (SEQ ID NO: 13651):TPT:SNIT (SEQ ID NO: 13572), AAPASXX (SEQ ID NO: 13646):VPA:SNIT (SEQ ID NO: 13572), HVPKPXX (SEQ ID NO: 13652):APT:SNIT (SEQ ID NO: 13572), RVPSTXX (SEQ ID NO: 13659):APV:SNIT (SEQ ID NO: 13572), ASAAPXX (SEQ ID NO: 13647):VPQ:SNIT (SEQ ID NO: 13572), ASASPXX (SEQ ID NO: 13648):VSQ:SNIT (SEQ ID NO: 13572), ASASPXX (SEQ ID NO: 13648):VPQ:SNIT (SEQ ID NO: 13572), SSVKXQP (SEQ ID NO: 13661):SRV:SNIT (SEQ ID NO: 13572), RNVQXRP (SEQ ID NO: 13658):TQV:SNIT (SEQ ID NO: 13572), RNVQXRP (SEQ ID NO: 13658):SRV:RSVK (SEQ ID NO: 13569), KIPKAXX (SEQ ID NO: 13655):VPT:RSVK (SEQ ID NO: 13569), GIPEPXX (SEQ ID NO: 13650):VPE:RSVK (SEQ ID NO: 13569), SIPKAXX (SEQ ID NO: 13660):VPT:RSVK (SEQ ID NO: 13569), HVTKPTX (SEQ ID NO: 13653):APT:RSVK (SEQ ID NO: 13569), YVPKPXX (SEQ ID NO: 13664):APT:RSVK (SEQ ID NO: 13569), TVPKPXX (SEQ ID NO: 13663):APT:RSVK (SEQ ID NO: 13569), AVPKAXX (SEQ ID NO: 13649):APT:RSVK (SEQ ID NO: 13569), KVGKAXX (SEQ ID NO: 13656):VPT:RSVK (SEQ ID NO: 13569), KASKAXX (SEQ ID NO: 13654):VPT:RSVK (SEQ ID NO: 13569), GSAGPXX (SEQ ID NO: 13651):TPT:RSVK (SEQ ID NO: 13569), AAPASXX (SEQ ID NO: 13646):VPA:RSVK (SEQ ID NO: 13569), STPPTXX (SEQ ID NO: 13662):VPT:RSVK (SEQ ID NO: 13569), HVPKPXX (SEQ ID NO: 13652):APT:RSVK (SEQ ID NO: 13569), RVPSTXX (SEQ ID NO: 13659):APV:RSVK (SEQ ID NO: 13569), ASAAPXX (SEQ ID NO: 13647):VPQ:RSVK (SEQ ID NO: 13569), ASASPXX (SEQ ID NO: 13648):VSQ:RSVK (SEQ ID NO: 13569), ASASPXX (SEQ ID NO: 13648):VPQ:RSVK (SEQ ID NO: 13569), NDEGLEX (SEQ ID NO: 13657):VPT:RSVK (SEQ ID NO: 13569), RNVQXRP (SEQ ID NO: 13658):TQV:RSVK (SEQ ID NO: 13569), SSVKXQP (SEQ ID NO: 13661):TQV:RPVQ (SEQ ID NO: 13568), KIPKAXX (SEQ ID NO: 13655):VPT:RPVQ (SEQ ID NO: 13568), GIPEPXX (SEQ ID NO: 13650):VPE:RPVQ (SEQ ID NO: 13568), SIPKAXX (SEQ ID NO: 13660):VPT:RPVQ (SEQ ID NO: 13568), HVTKPTX (SEQ ID NO: 13653):APT:RPVQ (SEQ ID NO: 13568), YVPKPXX (SEQ ID NO: 13664):APT:RPVQ (SEQ ID NO: 13568), TVPKPXX (SEQ ID NO: 13663):APT:RPVQ (SEQ ID NO: 13568), AVPKAXX (SEQ ID NO: 13649):APT:RPVQ (SEQ ID NO: 13568), KVGKAXX (SEQ ID NO: 13656):VPT:RPVQ (SEQ ID NO: 13568), KASKAXX (SEQ ID NO: 13654):VPT:RPVQ (SEQ ID NO: 13568), GSAGPXX (SEQ ID NO: 13651):TPT:RPVQ (SEQ ID NO: 13568), AAPASXX (SEQ ID NO: 13646):VPA:RPVQ (SEQ ID NO: 13568), STPPTXX (SEQ ID NO: 13662):VPT:RPVQ (SEQ ID NO: 13568), HVPKPXX (SEQ ID NO: 13652):APT:RPVQ (SEQ ID NO: 13568), RVPSTXX (SEQ ID NO: 13659):APV:RPVQ (SEQ ID NO: 13568), ASAAPXX (SEQ ID NO: 13647):VPQ:RPVQ (SEQ ID NO: 13568), ASASPXX (SEQ ID NO: 13648):VSQ:RPVQ (SEQ ID NO: 13568), ASASPXX (SEQ ID NO: 13648):VPQ:RPVQ (SEQ ID NO: 13568), NDEGLEX (SEQ ID NO: 13657):VPT:RPVQ (SEQ ID NO: 13568) and SSVKXQP (SEQ ID NO: 13661):SRV:RPVQ (SEQ ID NO: 13568).

[0383] In certain embodiments, the triplet PEP7:PEP3:PEP12 is selected from the group consisting of GIPEPXX (SEQ ID NO: 13650):VPT:SAIS-AA¹⁷-LYL (SEQ ID NO: 13808), HVTKPTX (SEQ ID NO: 13653):VPT:SAIS-AA¹⁷-LYL (SEQ ID NO: 13808), YVPKPXX (SEQ ID NO: 13664):VPT:SAIS-AA¹⁷-LYL (SEQ ID NO: 13808), TVPKPXX (SEQ ID NO: 13663):VPT:SAIS-AA¹⁷-LYL (SEQ ID NO: 13808), AVPKAXX (SEQ ID NO: 13649):VPT:SAIS-AA¹⁷-LYL (SEQ ID NO: 13808), KVGKAXX (SEQ ID NO: 13656):VPT:SAIS-AA¹⁷-LYL (SEQ ID NO: 13808), KASKAXX (SEQ ID NO: 13654):VPT:SAIS-AA¹⁷-LYL (SEQ ID NO: 13808), GSAGPXX (SEQ ID NO: 13651):VPT:SAIS-AA¹⁷-LYL (SEQ ID NO: 13808), AAPASXX (SEQ ID NO: 13646):VPT:SAIS-AA¹⁷-LYL (SEQ ID NO: 13808), STPPTXX (SEQ ID NO: 13662):VPT:SAIS-AA¹⁷-LYL (SEQ ID NO: 13808), HVPKPXX (SEQ ID NO: 13652):VPT:SAIS-AA¹⁷-LYL (SEQ ID NO: 13808), RVPSTXX (SEQ ID NO: 13659):VPT:SAIS-AA¹⁷-LYL (SEQ ID NO: 13808), ASAAPXX (SEQ ID NO: 13647):VPT:SAIS-AA¹⁷-LYL (SEQ ID NO: 13808), ASASPXX (SEQ ID NO: 13648):VPT:SAIS-AA¹⁷-LYL (SEQ ID NO: 13808), GIPEPXX (SEQ ID NO: 13650):VPE:SAIS-AA¹⁷-LYL (SEQ ID NO: 13808), HVTKPTX (SEQ ID NO: 13653):APT:SAIS-AA¹⁷-LYL (SEQ ID NO: 13808), YVPKPXX (SEQ ID NO: 13664):APT:SAIS-AA¹⁷-LYL (SEQ ID NO: 13808), TVPKPXX (SEQ ID NO: 13663):APT:SAIS-AA¹⁷-LYL (SEQ ID NO: 13808), AVPKAXX (SEQ ID NO: 13649):APT:SAIS-AA¹⁷-LYL (SEQ ID NO: 13808), GSAGPXX (SEQ ID NO: 13651):TPT:SAIS-AA¹⁷-LYL (SEQ ID NO: 13808), AAPASXX (SEQ ID NO: 13646):VPA:SAIS-AA¹⁷-LYL (SEQ ID NO: 13808), HVPKPXX (SEQ ID NO: 13652):APT:SAIS-AA¹⁷-LYL (SEQ ID NO: 13808), RVPSTXX (SEQ ID NO: 13659):APV:SAIS-AA¹⁷-LYL (SEQ ID NO: 13808), ASAAPXX (SEQ ID NO: 13647):VPQ:SAIS-AA¹⁷-LYL (SEQ ID NO: 13808), ASASPXX (SEQ ID NO: 13648):VSQ:SAIS-AA¹⁷-LYL (SEQ ID NO: 13808), ASASPXX (SEQ ID NO: 13648):VPQ:SAIS-AA¹⁷-LYL (SEQ ID NO: 13808), SSVKXQP (SEQ ID NO: 13661):SRV:SAIS-AA¹⁷-LYL (SEQ ID NO: 13808), RNVQXRP (SEQ ID NO: 13658):TQV:SAIS-AA¹⁷-LYL (SEQ ID NO: 13808), KIPKAXX (SEQ ID NO: 13655):VPE:SSLS-AA¹⁷-LFF (SEQ ID NO: 13815), SIPKAXX (SEQ ID NO: 13660):VPE:SSLS-AA¹⁷-LFF (SEQ ID NO: 13815), HVTKPTX (SEQ ID NO: 13653):VPE:SSLS-AA¹⁷-LFF (SEQ ID NO: 13815), YVPKPXX (SEQ ID NO: 13664):VPE:SSLS-AA¹⁷-LFF (SEQ ID NO: 13815), TVPKPXX (SEQ ID NO: 13663):VPE:SSLS-AA¹⁷-LFF (SEQ ID NO: 13815), AVPKAXX (SEQ ID NO: 13649):VPE:SSLS-AA¹⁷-LFF (SEQ ID NO: 13815), KVGKAXX (SEQ ID NO: 13656):VPE:SSLS-AA¹⁷-LFF (SEQ ID NO: 13815), KASKAXX (SEQ ID NO: 13654):VPE:SSLS-AA¹⁷-LFF (SEQ ID NO: 13815), GSAGPXX (SEQ ID NO: 13651):VPE:SSLS-AA¹⁷-LFF (SEQ ID NO: 13815), AAPASXX (SEQ ID NO: 13646):VPE:SSLS-AA¹⁷-LFF (SEQ ID NO: 13815), STPPTXX (SEQ ID NO: 13662):VPE:SSLS-AA¹⁷-LFF (SEQ ID NO: 13815), HVPKPXX (SEQ ID NO: 13652):VPE:SSLS-AA¹⁷-LFF (SEQ ID NO: 13815), RVPSTXX (SEQ ID NO: 13659):VPE:SSLS-AA¹⁷-LFF (SEQ ID NO: 13815), ASAAPXX (SEQ ID NO: 13647):VPE:SSLS-AA¹⁷-LFF (SEQ ID NO: 13815), ASASPXX (SEQ ID NO: 13648):VPE:SSLS-AA¹⁷-LFF (SEQ ID NO: 13815), KIPKAXX (SEQ ID NO: 13655):VPT:SSLS-AA¹⁷-LFF (SEQ ID NO: 13815), SIPKAXX (SEQ ID NO: 13660):VPT:SSLS-AA¹⁷-LFF (SEQ ID NO: 13815), HVTKPTX (SEQ ID NO: 13653):APT:SSLS-AA¹⁷-LFF (SEQ ID NO: 13815), YVPKPXX (SEQ ID NO: 13664):APT:SSLS-AA¹⁷-LFF (SEQ ID NO: 13815), TVPKPXX (SEQ ID NO: 13663):APT:SSLS-AA¹⁷-LFF (SEQ ID NO: 13815), AVPKAXX (SEQ ID NO: 13649):APT:SSLS-AA¹⁷-LFF (SEQ ID NO: 13815), KVGKAXX (SEQ ID NO: 13656):VPT:SSLS-AA¹⁷-LFF (SEQ ID NO: 13815), KASKAXX (SEQ ID NO: 13654):VPT:SSLS-AA¹⁷-LFF (SEQ ID NO: 13815), GSAGPXX (SEQ ID NO: 13651):TPT:SSLS-AA¹⁷-LFF (SEQ ID NO: 13815), AAPASXX (SEQ ID NO: 13646):VPA:SSLS-AA¹⁷-LFF (SEQ ID NO: 13815), STPPTXX (SEQ ID NO: 13662):VPT:SSLS-AA¹⁷-LFF (SEQ ID NO: 13815), HVPKPXX (SEQ ID NO: 13652):APT:SSLS-AA¹⁷-LFF (SEQ ID NO: 13815), RVPSTXX (SEQ ID NO: 13659):APV:SSLS-AA¹⁷-LFF (SEQ ID NO: 13815), ASAAPXX (SEQ ID NO: 13647):VPQ:SSLS-AA¹⁷-LFF (SEQ ID NO: 13815), ASASPXX (SEQ ID NO: 13648):VSQ:SSLS-AA¹⁷-LFF (SEQ ID NO: 13815), ASASPXX (SEQ ID NO: 13648):VPQ:SSLS-AA¹⁷-LFF (SEQ ID NO: 13815), NDEGLEX (SEQ ID NO: 13657):VPT:SSLS-AA¹⁷-LFF (SEQ ID NO: 13815), SSVKXQP (SEQ ID NO: 13661):SRV:SSLS-AA¹⁷-LFF (SEQ ID NO: 13815), RNVQXRP (SEQ ID NO: 13658):TQV:SSLS-AA¹⁷-LFF (SEQ ID NO: 13815), KIPKAXX (SEQ ID NO: 13655):APT:NAIS-AA¹⁷-LYF (SEQ ID NO: 13805), GIPEPXX (SEQ ID NO: 13650):APT:NAIS-AA¹⁷-LYF (SEQ ID NO: 13805), SIPKAXX (SEQ ID NO: 13660):APT:NAIS-AA¹⁷-LYF (SEQ ID NO: 13805), AVPKAXX (SEQ ID NO: 13649):APT:NAIS-AA¹⁷-LYF (SEQ ID NO: 13805), KVGKAXX (SEQ ID NO: 13656):APT:NAIS-AA¹⁷-LYF (SEQ ID NO: 13805), KASKAXX (SEQ ID NO: 13654):APT:NAIS-AA¹⁷-LYF (SEQ ID NO: 13805), GSAGPXX (SEQ ID NO: 13651):APT:NAIS-AA¹⁷-LYF (SEQ ID NO: 13805), AAPASXX (SEQ ID NO: 13646):APT:NAIS-AA¹⁷-LYF (SEQ ID NO: 13805), STPPTXX (SEQ ID NO: 13662):APT:NAIS-AA¹⁷-LYF (SEQ ID NO: 13805), RVPSTXX (SEQ ID NO: 13659):APT:NAIS-AA¹⁷-LYF (SEQ ID NO: 13805), ASAAPXX (SEQ ID NO: 13647):APT:NAIS-AA¹⁷-LYF (SEQ ID NO: 13805), ASASPXX (SEQ ID NO: 13648):APT:NAIS-AA¹⁷-LYF (SEQ ID NO: 13805), KIPKAXX (SEQ ID NO: 13655):VPT:NAIS-AA¹⁷-LYF (SEQ ID NO: 13805), GIPEPXX (SEQ ID NO: 13650):VPE:NAIS-AA¹⁷-LYF (SEQ ID NO: 13805), SIPKAXX (SEQ ID NO: 13660):VPT:NAIS-AA¹⁷-LYF (SEQ ID NO: 13805), KVGKAXX (SEQ ID NO: 13656):VPT:NAIS-AA¹⁷-LYF (SEQ ID NO: 13805), KASKAXX (SEQ ID NO: 13654):VPT:NAIS-AA¹⁷-LYF (SEQ ID NO: 13805), GSAGPXX (SEQ ID NO: 13651):TPT:NAIS-AA¹⁷-LYF (SEQ ID NO: 13805), AAPASXX (SEQ ID NO: 13646):VPA:NAIS-AA¹⁷-LYF (SEQ ID NO: 13805), STPPTXX (SEQ ID NO: 13662):VPT:NAIS-AA¹⁷-LYF (SEQ ID NO: 13805), RVPSTXX (SEQ ID NO: 13659):APV:NAIS-AA¹⁷-LYF (SEQ ID NO: 13805), ASAAPXX (SEQ ID NO: 13647):VPQ:NAIS-AA¹⁷-LYF (SEQ ID NO: 13805), ASASPXX (SEQ ID NO: 13648):VSQ:NAIS-AA¹⁷-LYF (SEQ ID NO: 13805), ASASPXX (SEQ ID NO: 13648):VPQ:NAIS-AA¹⁷-LYF (SEQ ID NO: 13805), NDEGLEX (SEQ ID NO: 13657):VPT:NAIS-AA¹⁷-LYF (SEQ ID NO: 13805), SSVKXQP (SEQ ID NO: 13661):SRV:NAIS-AA¹⁷-LYF (SEQ ID NO: 13805), RNVQXRP (SEQ ID NO: 13658):TQV:NAIS-AA¹⁷-LYF (SEQ ID NO: 13805), KIPKAXX (SEQ ID NO: 13655):APT:SATS-AA¹⁷-LYY (SEQ ID NO: 13809), GIPEPXX (SEQ ID NO: 13650):APT:SATS-AA¹⁷-LYY (SEQ ID NO: 13809), SIPKAXX (SEQ ID NO: 13660):APT:SATS-AA¹⁷-LYY (SEQ ID NO: 13809), HVTKPTX (SEQ ID NO: 13653):APT:SATS-AA¹⁷-LYY (SEQ ID NO: 13809), YVPKPXX (SEQ ID NO: 13664):APT:SATS-AA¹⁷-LYY (SEQ ID NO: 13809), TVPKPXX (SEQ ID NO: 13663):APT:SATS-AA¹⁷-LYY (SEQ ID NO: 13809), KVGKAXX (SEQ ID NO: 13656):APT:SATS-AA¹⁷-LYY (SEQ ID NO: 13809), KASKAXX (SEQ ID NO: 13654):APT:SATS-AA¹⁷-LYY (SEQ ID NO: 13809), GSAGPXX (SEQ ID NO: 13651):APT:SATS-AA¹⁷-LYY (SEQ ID NO: 13809), AAPASXX (SEQ ID NO: 13646):APT:SATS-AA¹⁷-LYY (SEQ ID NO: 13809), STPPTXX (SEQ ID NO: 13662):APT:SATS-AA¹⁷-LYY (SEQ ID NO: 13809), HVPKPXX (SEQ ID NO: 13652):APT:SATS-AA¹⁷-LYY (SEQ ID NO: 13809), RVPSTXX (SEQ ID NO: 13659):APT:SATS-AA¹⁷-LYY (SEQ ID NO: 13809), ASAAPXX (SEQ ID NO: 13647):APT:SATS-AA¹⁷-LYY (SEQ ID NO: 13809), ASASPXX (SEQ ID NO: 13648):APT:SATS-AA¹⁷-LYY (SEQ ID NO: 13809), KIPKAXX (SEQ ID NO: 13655):VPT:SATS-AA¹⁷-LYY (SEQ ID NO: 13809), GIPEPXX (SEQ ID NO: 13650):VPE:SATS-AA¹⁷-LYY (SEQ ID NO: 13809), SIPKAXX (SEQ ID NO: 13660):VPT:SATS-AA¹⁷-LYY (SEQ ID NO: 13809), KVGKAXX (SEQ ID NO: 13656):VPT:SATS-AA¹⁷-LYY (SEQ ID NO: 13809), KASKAXX (SEQ ID NO: 13654):VPT:SATS-AA¹⁷-LYY (SEQ ID NO: 13809), GSAGPXX (SEQ ID NO: 13651):TPT:SATS-AA¹⁷-LYY (SEQ ID NO: 13809), AAPASXX (SEQ ID NO: 13646):VPA:SATS-AA¹⁷-LYY (SEQ ID NO: 13809), STPPTXX (SEQ ID NO: 13662):VPT:SATS-AA¹⁷-LYY (SEQ ID NO: 13809), RVPSTXX (SEQ ID NO: 13659):APV:SATS-AA¹⁷-LYY (SEQ ID NO: 13809), ASAAPXX (SEQ ID NO: 13647):VPQ:SATS-AA¹⁷-LYY (SEQ ID NO: 13809), ASASPXX (SEQ ID NO: 13648):VSQ:SATS-AA¹⁷-LYY (SEQ ID NO: 13809), ASASPXX (SEQ ID NO: 13648):VPQ:SATS-AA¹⁷-LYY (SEQ ID NO: 13809), NDEGLEX (SEQ ID NO: 13657):VPT:SATS-AA¹⁷-LYY (SEQ ID NO: 13809), SSVKXQP (SEQ ID NO: 13661):SRV:SATS-AA¹⁷-LYY (SEQ ID NO: 13809), RNVQXRP (SEQ ID NO: 13658):TQV:SATS-AA¹⁷-LYY (SEQ ID NO: 13809), KIPKAXX (SEQ ID NO: 13655):VPT:SPIS-AA¹⁷-LYK (SEQ ID NO: 13814), GIPEPXX (SEQ ID NO: 13650):VPT:SPIS-AA¹⁷-LYK (SEQ ID NO: 13814), SIPKAXX (SEQ ID NO: 13660):VPT:SPIS-AA¹⁷-LYK (SEQ ID NO: 13814), HVTKPTX (SEQ ID NO: 13653):VPT:SPIS-AA¹⁷-LYK (SEQ ID NO: 13814), YVPKPXX (SEQ ID NO: 13664):VPT:SPIS-AA¹⁷-LYK (SEQ ID NO: 13814), TVPKPXX (SEQ ID NO: 13663):VPT:SPIS-AA¹⁷-LYK (SEQ ID NO: 13814), AVPKAXX (SEQ ID NO: 13649):VPT:SPIS-AA¹⁷-LYK (SEQ ID NO: 13814), KASKAXX (SEQ ID NO: 13654):VPT:SPIS-AA¹⁷-LYK (SEQ ID NO: 13814), GSAGPXX (SEQ ID NO: 13651):VPT:SPIS-AA¹⁷-LYK (SEQ ID NO: 13814), AAPASXX (SEQ ID NO: 13646):VPT:SPIS-AA¹⁷-LYK (SEQ ID NO: 13814), STPPTXX (SEQ ID NO: 13662):VPT:SPIS-AA¹⁷-LYK (SEQ ID NO: 13814), HVPKPXX (SEQ ID NO: 13652):VPT:SPIS-AA¹⁷-LYK (SEQ ID NO: 13814), RVPSTXX (SEQ ID NO: 13659):VPT:SPIS-AA¹⁷-LYK (SEQ ID NO: 13814), ASAAPXX (SEQ ID NO: 13647):VPT:SPIS-AA¹⁷-LYK (SEQ ID NO: 13814), ASASPXX (SEQ ID NO: 13648):VPT:SPIS-AA¹⁷-LYK (SEQ ID NO: 13814), GIPEPXX (SEQ ID NO: 13650):VPE:SPIS-AA¹⁷-LYK (SEQ ID NO: 13814), HVTKPTX (SEQ ID NO: 13653):APT:SPIS-AA¹⁷-LYK (SEQ ID NO: 13814), YVPKPXX (SEQ ID NO: 13664):APT:SPIS-AA¹⁷-LYK (SEQ ID NO: 13814), TVPKPXX (SEQ ID NO: 13663):APT:SPIS-AA¹⁷-LYK (SEQ ID NO: 13814), AVPKAXX (SEQ ID NO: 13649):APT:SPIS-AA¹⁷-LYK (SEQ ID NO: 13814), GSAGPXX (SEQ ID NO: 13651):TPT:SPIS-AA¹⁷-LYK (SEQ ID NO: 13814), AAPASXX (SEQ ID NO: 13646):VPA:SPIS-AA¹⁷-LYK (SEQ ID NO: 13814), HVPKPXX (SEQ ID NO: 13652):APT:SPIS-AA¹⁷-LYK (SEQ ID NO: 13814), RVPSTXX (SEQ ID NO: 13659):APV:SPIS-AA¹⁷-LYK (SEQ ID NO: 13814), ASAAPXX (SEQ ID NO: 13647):VPQ:SPIS-AA¹⁷-LYK (SEQ ID NO: 13814), ASASPXX (SEQ ID NO: 13648):VSQ:SPIS-AA¹⁷-LYK (SEQ ID NO: 13814), ASASPXX (SEQ ID NO: 13648):VPQ:SPIS-AA¹⁷-LYK (SEQ ID NO: 13814), SSVKXQP (SEQ ID NO: 13661):SRV:SPIS-AA¹⁷-LYK (SEQ ID NO: 13814), RNVQXRP (SEQ ID NO: 13658):TQV:SPIS-AA¹⁷-LYK (SEQ ID NO: 13814), KIPKAXX (SEQ ID NO: 13655):VPT:EPIS-AA¹⁷-LYL (SEQ ID NO: 13801), GIPEPXX (SEQ ID NO: 13650):VPT:EPIS-AA¹⁷-LYL (SEQ ID NO: 13801), SIPKAXX (SEQ ID NO: 13660):VPT:EPIS-AA¹⁷-LYL (SEQ ID NO: 13801), HVTKPTX (SEQ ID NO: 13653):VPT:EPIS-AA¹⁷-LYL (SEQ ID NO: 13801), YVPKPXX (SEQ ID NO: 13664):VPT:EPIS-AA¹⁷-LYL (SEQ ID NO: 13801), TVPKPXX (SEQ ID NO: 13663):VPT:EPIS-AA¹⁷-LYL (SEQ ID NO: 13801), AVPKAXX (SEQ ID NO: 13649):VPT:EPIS-AA¹⁷-LYL (SEQ ID NO: 13801), KVGKAXX (SEQ ID NO: 13656):VPT:EPIS-AA¹⁷-LYL (SEQ ID NO: 13801), GSAGPXX (SEQ ID NO: 13651):VPT:EPIS-AA¹⁷-LYL (SEQ ID NO: 13801), AAPASXX (SEQ ID NO: 13646):VPT:EPIS-AA¹⁷-LYL (SEQ ID NO: 13801), STPPTXX (SEQ ID NO: 13662):VPT:EPIS-AA¹⁷-LYL (SEQ ID NO: 13801), HVPKPXX (SEQ ID NO: 13652):VPT:EPIS-AA¹⁷-LYL (SEQ ID NO: 13801), RVPSTXX (SEQ ID NO: 13659):VPT:EPIS-AA¹⁷-LYL (SEQ ID NO: 13801), ASAAPXX (SEQ ID NO: 13647):VPT:EPIS-AA¹⁷-LYL (SEQ ID NO: 13801), ASASPXX (SEQ ID NO: 13648):VPT:EPIS-AA¹⁷-LYL (SEQ ID NO: 13801), GIPEPXX (SEQ ID NO: 13650):VPE:EPIS-AA¹⁷-LYL (SEQ ID NO: 13801), HVTKPTX (SEQ ID NO: 13653):APT:EPIS-AA¹⁷-LYL (SEQ ID NO: 13801), YVPKPXX (SEQ ID NO: 13664):APT:EPIS-AA¹⁷-LYL (SEQ ID NO: 13801), TVPKPXX (SEQ ID NO: 13663):APT:EPIS-AA¹⁷-LYL (SEQ ID NO: 13801), AVPKAXX (SEQ ID NO: 13649):APT:EPIS-AA¹⁷-LYL (SEQ ID NO: 13801), GSAGPXX (SEQ ID NO: 13651):TPT:EPIS-AA¹⁷-LYL (SEQ ID NO: 13801), AAPASXX (SEQ ID NO: 13646):VPA:EPIS-AA¹⁷-LYL (SEQ ID NO: 13801), HVPKPXX (SEQ ID NO: 13652):APT:EPIS-AA¹⁷-LYL (SEQ ID NO: 13801), RVPSTXX (SEQ ID NO: 13659):APV:EPIS-AA¹⁷-LYL (SEQ ID NO: 13801), ASAAPXX (SEQ ID NO: 13647):VPQ:EPIS-AA¹⁷-LYL (SEQ ID NO: 13801), ASASPXX (SEQ ID NO: 13648):VSQ:EPIS-AA¹⁷-LYL (SEQ ID NO: 13801), ASASPXX (SEQ ID NO: 13648):VPQ:EPIS-AA¹⁷-LYL (SEQ ID NO: 13801), SSVKXQP (SEQ ID NO: 13661):SRV:EPIS-AA¹⁷-LYL (SEQ ID NO: 13801), RNVQXRP (SEQ ID NO: 13658):TQV:EPIS-AA¹⁷-LYL (SEQ ID NO: 13801), KIPKAXX (SEQ ID NO: 13655):TPT:SPIN-AA¹⁷-LYF (SEQ ID NO: 13811), GIPEPXX (SEQ ID NO: 13650):TPT:SPIN-AA¹⁷-LYF (SEQ ID NO: 13811), SIPKAXX (SEQ ID NO: 13660):TPT:SPIN-AA¹⁷-LYF (SEQ ID NO: 13811), HVTKPTX (SEQ ID NO: 13653):TPT:SPIN-AA¹⁷-LYF (SEQ ID NO: 13811), YVPKPXX (SEQ ID NO: 13664):TPT:SPIN-AA¹⁷-LYF (SEQ ID NO: 13811), TVPKPXX (SEQ ID NO: 13663):TPT:SPIN-AA¹⁷-LYF (SEQ ID NO: 13811), AVPKAXX (SEQ ID NO: 13649):TPT:SPIN-AA¹⁷-LYF (SEQ ID NO: 13811), KVGKAXX (SEQ ID NO: 13656):TPT:SPIN-AA¹⁷-LYF (SEQ ID NO: 13811), KASKAXX (SEQ ID NO: 13654):TPT:SPIN-AA¹⁷-LYF (SEQ ID NO: 13811), AAPASXX (SEQ ID NO: 13646):TPT:SPIN-AA¹⁷-LYF (SEQ ID NO: 13811), STPPTXX (SEQ ID NO: 13662):TPT:SPIN-AA¹⁷-LYF (SEQ ID NO: 13811), HVPKPXX (SEQ ID NO: 13652):TPT:SPIN-AA¹⁷-LYF (SEQ ID NO: 13811), RVPSTXX (SEQ ID NO: 13659):TPT:SPIN-AA¹⁷-LYF (SEQ ID NO: 13811), ASAAPXX (SEQ ID NO: 13647):TPT:SPIN-AA¹⁷-LYF (SEQ ID NO: 13811), ASASPXX (SEQ ID NO: 13648):TPT:SPIN-AA¹⁷-LYF (SEQ ID NO: 13811), KIPKAXX (SEQ ID NO: 13655):VPT:SPIN-AA¹⁷-LYF (SEQ ID NO: 13811), GIPEPXX (SEQ ID NO: 13650):VPE:SPIN-AA¹⁷-LYF (SEQ ID NO: 13811), SIPKAXX (SEQ ID NO: 13660):VPT:SPIN-AA¹⁷-LYF (SEQ ID NO: 13811), HVTKPTX (SEQ ID NO: 13653):APT:SPIN-AA¹⁷-LYF (SEQ ID NO: 13811), YVPKPXX (SEQ ID NO: 13664):APT:SPIN-AA¹⁷-LYF (SEQ ID NO: 13811), TVPKPXX (SEQ ID NO: 13663):APT:SPIN-AA¹⁷-LYF (SEQ ID NO: 13811), AVPKAXX (SEQ ID NO: 13649):APT:SPIN-AA¹⁷-LYF (SEQ ID NO: 13811), KVGKAXX (SEQ ID NO: 13656):VPT:SPIN-AA¹⁷-LYF (SEQ ID NO: 13811), KASKAXX (SEQ ID NO: 13654):VPT:SPIN-AA¹⁷-LYF (SEQ ID NO: 13811), AAPASXX (SEQ ID NO: 13646):VPA:SPIN-AA¹⁷-LYF (SEQ ID NO: 13811), STPPTXX (SEQ ID NO: 13662):VPT:SPIN-AA¹⁷-LYF (SEQ ID NO: 13811), HVPKPXX (SEQ ID NO: 13652):APT:SPIN-AA¹⁷-LYF (SEQ ID NO: 13811), RVPSTXX (SEQ ID NO: 13659):APV:SPIN-AA¹⁷-LYF (SEQ ID NO: 13811), ASAAPXX (SEQ ID NO: 13647):VPQ:SPIN-AA¹⁷-LYF (SEQ ID NO: 13811), ASASPXX (SEQ ID NO: 13648):VSQ:SPIN-AA¹⁷-LYF (SEQ ID NO: 13811), ASASPXX (SEQ ID NO: 13648):VPQ:SPIN-AA¹⁷-LYF (SEQ ID NO: 13811), NDEGLEX (SEQ ID NO: 13657):VPT:SPIN-AA¹⁷-LYF (SEQ ID NO: 13811), SSVKXQP (SEQ ID NO: 13661):SRV:SPIN-AA¹⁷-LYF (SEQ ID NO: 13811), RNVQXRP (SEQ ID NO: 13658):TQV:SPIN-AA¹⁷-LYF (SEQ ID NO: 13811), KIPKAXX (SEQ ID NO: 13655):VPA:SPIS-AA¹⁷-LYI (SEQ ID NO: 13813), GIPEPXX (SEQ ID NO: 13650):VPA:SPIS-AA¹⁷-LYI (SEQ ID NO: 13813), SIPKAXX (SEQ ID NO: 13660):VPA:SPIS-AA¹⁷-LYI (SEQ ID NO: 13813), HVTKPTX (SEQ ID NO: 13653):VPA:SPIS-AA¹⁷-LYI (SEQ ID NO: 13813), YVPKPXX (SEQ ID NO: 13664):VPA:SPIS-AA¹⁷-LYI (SEQ ID NO: 13813), TVPKPXX (SEQ ID NO: 13663):VPA:SPIS-AA¹⁷-LYI (SEQ ID NO: 13813), AVPKAXX (SEQ ID NO: 13649):VPA:SPIS-AA¹⁷-LYI (SEQ ID NO: 13813), KVGKAXX (SEQ ID NO: 13656):VPA:SPIS-AA¹⁷-LYI (SEQ ID NO: 13813), KASKAXX (SEQ ID NO: 13654):VPA:SPIS-AA¹⁷-LYI (SEQ ID NO: 13813), GSAGPXX (SEQ ID NO: 13651):VPA:SPIS-AA¹⁷-LYI (SEQ ID NO: 13813), STPPTXX (SEQ ID NO: 13662):VPA:SPIS-AA¹⁷-LYI (SEQ ID NO: 13813), HVPKPXX (SEQ ID NO: 13652):VPA:SPIS-AA¹⁷-LYI (SEQ ID NO: 13813), RVPSTXX (SEQ ID NO: 13659):VPA:SPIS-AA¹⁷-LYI (SEQ ID NO: 13813), ASAAPXX (SEQ ID NO: 13647):VPA:SPIS-AA¹⁷-LYI (SEQ ID NO: 13813), ASASPXX (SEQ ID NO: 13648):VPA:SPIS-AA¹⁷-LYI (SEQ ID NO: 13813), KIPKAXX (SEQ ID NO: 13655):VPT:SPIS-AA¹⁷-LYI (SEQ ID NO: 13813), GIPEPXX (SEQ ID NO: 13650):VPE:SPIS-AA¹⁷-LYI (SEQ ID NO: 13813), SIPKAXX (SEQ ID NO: 13660):VPT:SPIS-AA¹⁷-LYI (SEQ ID NO: 13813), HVTKPTX (SEQ ID NO: 13653):APT:SPIS-AA¹⁷-LYI (SEQ ID NO: 13813), YVPKPXX (SEQ ID NO: 13664):APT:SPIS-AA¹⁷-LYI (SEQ ID NO: 13813), TVPKPXX (SEQ ID NO: 13663):APT:SPIS-AA¹⁷-LYI (SEQ ID NO: 13813), AVPKAXX (SEQ ID NO: 13649):APT:SPIS-AA¹⁷-LYI (SEQ ID NO: 13813), KVGKAXX (SEQ ID NO: 13656):VPT:SPIS-AA¹⁷-LYI (SEQ ID NO: 13813), KASKAXX (SEQ ID NO: 13654):VPT:SPIS-AA¹⁷-LYI (SEQ ID NO: 13813), GSAGPXX (SEQ ID NO: 13651):TPT:SPIS-AA¹⁷-LYI (SEQ ID NO: 13813), STPPTXX (SEQ ID NO: 13662):VPT:SPIS-AA¹⁷-LYI (SEQ ID NO: 13813), HVPKPXX (SEQ ID NO: 13652):APT:SPIS-AA¹⁷-LYI (SEQ ID NO: 13813), RVPSTXX (SEQ ID NO: 13659):APV:SPIS-AA¹⁷-LYI (SEQ ID NO: 13813), ASAAPXX (SEQ ID NO: 13647):VPQ:SPIS-AA¹⁷-LYI (SEQ ID NO: 13813), ASASPXX (SEQ ID NO: 13648):VSQ:SPIS-AA¹⁷-LYI (SEQ ID NO: 13813), ASASPXX (SEQ ID NO: 13648):VPQ:SPIS-AA¹⁷-LYI (SEQ ID NO: 13813), NDEGLEX (SEQ ID NO: 13657):VPT:SPIS-AA¹⁷-LYI (SEQ ID NO: 13813), SSVKXQP (SEQ ID NO: 13661):SRV:SPIS-AA¹⁷-LYI (SEQ ID NO: 13813), RNVQXRP (SEQ ID NO: 13658):TQV:SPIS-AA¹⁷-LYI (SEQ ID NO: 13813), KIPKAXX (SEQ ID NO: 13655):VPT:SPIS-AA¹⁷-LFI (SEQ ID NO: 13812), GIPEPXX (SEQ ID NO: 13650):VPT:SPIS-AA¹⁷-LFI (SEQ ID NO: 13812), SIPKAXX (SEQ ID NO: 13660):VPT:SPIS-AA¹⁷-LFI (SEQ ID NO: 13812), HVTKPTX (SEQ ID NO: 13653):VPT:SPIS-AA¹⁷-LFI (SEQ ID NO: 13812), YVPKPXX (SEQ ID NO: 13664):VPT:SPIS-AA¹⁷-LFI (SEQ ID NO: 13812), TVPKPXX (SEQ ID NO: 13663):VPT:SPIS-AA¹⁷-LFI (SEQ ID NO: 13812), AVPKAXX (SEQ ID NO: 13649):VPT:SPIS-AA¹⁷-LFI (SEQ ID NO: 13812), KVGKAXX (SEQ ID NO: 13656):VPT:SPIS-AA¹⁷-LFI (SEQ ID NO: 13812), KASKAXX (SEQ ID NO: 13654):VPT:SPIS-AA¹⁷-LFI (SEQ ID NO: 13812), GSAGPXX (SEQ ID NO: 13651):VPT:SPIS-AA¹⁷-LFI (SEQ ID NO: 13812), AAPASXX (SEQ ID NO: 13646):VPT:SPIS-AA¹⁷-LFI (SEQ ID NO: 13812), HVPKPXX (SEQ ID NO: 13652):VPT:SPIS-AA¹⁷-LFI (SEQ ID NO: 13812), RVPSTXX (SEQ ID NO: 13659):VPT:SPIS-AA¹⁷-LFI (SEQ ID NO: 13812), ASAAPXX (SEQ ID NO: 13647):VPT:SPIS-AA¹⁷-LFI (SEQ ID NO: 13812), ASASPXX (SEQ ID NO: 13648):VPT:SPIS-AA¹⁷-LFI (SEQ ID NO: 13812), GIPEPXX (SEQ ID NO: 13650):VPE:SPIS-AA¹⁷-LFI (SEQ ID NO: 13812), HVTKPTX (SEQ ID NO: 13653):APT:SPIS-AA¹⁷-LFI (SEQ ID NO: 13812), YVPKPXX (SEQ ID NO: 13664):APT:SPIS-AA¹⁷-LFI (SEQ ID NO: 13812), TVPKPXX (SEQ ID NO: 13663):APT:SPIS-AA¹⁷-LFI (SEQ ID NO: 13812), AVPKAXX (SEQ ID NO: 13649):APT:SPIS-AA¹⁷-LFI (SEQ ID NO: 13812), GSAGPXX (SEQ ID NO: 13651):TPT:SPIS-AA¹⁷-LFI (SEQ ID NO: 13812), AAPASXX (SEQ ID NO: 13646):VPA:SPIS-AA¹⁷-LFI (SEQ ID NO: 13812), HVPKPXX (SEQ ID NO: 13652):APT:SPIS-AA¹⁷-LFI (SEQ ID NO: 13812), RVPSTXX (SEQ ID NO: 13659):APV:SPIS-AA¹⁷-LFI (SEQ ID NO: 13812), ASAAPXX (SEQ ID NO: 13647):VPQ:SPIS-AA¹⁷-LFI (SEQ ID NO: 13812), ASASPXX (SEQ ID NO: 13648):VSQ:SPIS-AA¹⁷-LFI (SEQ ID NO: 13812), ASASPXX (SEQ ID NO: 13648):VPQ:SPIS-AA¹⁷-LFI (SEQ ID NO: 13812), SSVKXQP (SEQ ID NO: 13661):SRV:SPIS-AA¹⁷-LFI (SEQ ID NO: 13812), RNVQXRP (SEQ ID NO: 13658):TQV:SPIS-AA¹⁷-LFI (SEQ ID NO: 13812), KIPKAXX (SEQ ID NO: 13655):APV:KPLS-AA¹⁷-LYV (SEQ ID NO: 13804), GIPEPXX (SEQ ID NO: 13650):APV:KPLS-AA¹⁷-LYV (SEQ ID NO: 13804), SIPKAXX (SEQ ID NO: 13660):APV:KPLS-AA¹⁷-LYV (SEQ ID NO: 13804), HVTKPTX (SEQ ID NO: 13653):APV:KPLS-AA¹⁷-LYV (SEQ ID NO: 13804), YVPKPXX (SEQ ID NO: 13664):APV:KPLS-AA¹⁷-LYV (SEQ ID NO: 13804), TVPKPXX (SEQ ID NO: 13663):APV:KPLS-AA¹⁷-LYV (SEQ ID NO: 13804), AVPKAXX (SEQ ID NO: 13649):APV:KPLS-AA¹⁷-LYV (SEQ ID NO: 13804), KVGKAXX (SEQ ID NO: 13656):APV:KPLS-AA¹⁷-LYV (SEQ ID NO: 13804), KASKAXX (SEQ ID NO: 13654):APV:KPLS-AA¹⁷-LYV (SEQ ID NO: 13804), GSAGPXX (SEQ ID NO: 13651):APV:KPLS-AA¹⁷-LYV (SEQ ID NO: 13804), AAPASXX (SEQ ID NO: 13646):APV:KPLS-AA¹⁷-LYV (SEQ ID NO: 13804), STPPTXX (SEQ ID NO: 13662):APV:KPLS-AA¹⁷-LYV (SEQ ID NO: 13804), HVPKPXX (SEQ ID NO: 13652):APV:KPLS-AA¹⁷-LYV (SEQ ID NO: 13804), ASAAPXX (SEQ ID NO: 13647):APV:KPLS-AA¹⁷-LYV (SEQ ID NO: 13804), ASASPXX (SEQ ID NO: 13648):APV:KPLS-AA¹⁷-LYV (SEQ ID NO: 13804), KIPKAXX (SEQ ID NO: 13655):VPT:KPLS-AA¹⁷-LYV (SEQ ID NO: 13804), GIPEPXX (SEQ ID NO: 13650):VPE:KPLS-AA¹⁷-LYV (SEQ ID NO: 13804), SIPKAXX (SEQ ID NO: 13660):VPT:KPLS-AA¹⁷-LYV (SEQ ID NO: 13804), HVTKPTX (SEQ ID NO: 13653):APT:KPLS-AA¹⁷-LYV (SEQ ID NO: 13804), YVPKPXX (SEQ ID NO: 13664):APT:KPLS-AA¹⁷-LYV (SEQ ID NO: 13804), TVPKPXX (SEQ ID NO: 13663):APT:KPLS-AA¹⁷-LYV (SEQ ID NO: 13804), AVPKAXX (SEQ ID NO: 13649):APT:KPLS-AA¹⁷-LYV (SEQ ID NO: 13804), KVGKAXX (SEQ ID NO: 13656):VPT:KPLS-AA¹⁷-LYV (SEQ ID NO: 13804), KASKAXX (SEQ ID NO: 13654):VPT:KPLS-AA¹⁷-LYV (SEQ ID NO: 13804), GSAGPXX (SEQ ID NO: 13651):TPT:KPLS-AA¹⁷-LYV (SEQ ID NO: 13804), AAPASXX (SEQ ID NO: 13646):VPA:KPLS-AA¹⁷-LYV (SEQ ID NO: 13804), STPPTXX (SEQ ID NO: 13662):VPT:KPLS-AA¹⁷-LYV (SEQ ID NO: 13804), HVPKPXX (SEQ ID NO: 13652):APT:KPLS-AA¹⁷-LYV (SEQ ID NO: 13804), ASAAPXX (SEQ ID NO: 13647):VPQ:KPLS-AA¹⁷-LYV (SEQ ID NO: 13804), ASASPXX (SEQ ID NO: 13648):VSQ:KPLS-AA¹⁷-LYV (SEQ ID NO: 13804), ASASPXX (SEQ ID NO: 13648):VPQ:KPLS-AA¹⁷-LYV (SEQ ID NO: 13804), NDEGLEX (SEQ ID NO: 13657):VPT:KPLS-AA¹⁷-LYV (SEQ ID NO: 13804), SSVKXQP (SEQ ID NO: 13661):SRV:KPLS-AA¹⁷-LYV (SEQ ID NO: 13804), RNVQXRP (SEQ ID NO: 13658):TQV:KPLS-AA¹⁷-LYV (SEQ ID NO: 13804), KIPKAXX (SEQ ID NO: 13655):VPQ:EPLP-AA¹⁷-VYY (SEQ ID NO: 13802), GIPEPXX (SEQ ID NO: 13650):VPQ:EPLP-AA¹⁷-VYY (SEQ ID NO: 13802), SIPKAXX (SEQ ID NO: 13660):VPQ:EPLP-AA¹⁷-VYY (SEQ ID NO: 13802), HVTKPTX (SEQ ID NO: 13653):VPQ:EPLP-AA¹⁷-VYY (SEQ ID NO: 13802), YVPKPXX (SEQ ID NO: 13664):VPQ:EPLP-AA¹⁷-VYY (SEQ ID NO: 13802), TVPKPXX (SEQ ID NO: 13663):VPQ:EPLP-AA¹⁷-VYY (SEQ ID NO: 13802), AVPKAXX (SEQ ID NO: 13649):VPQ:EPLP-AA¹⁷-VYY (SEQ ID NO: 13802), KVGKAXX (SEQ ID NO: 13656):VPQ:EPLP-AA¹⁷-VYY (SEQ ID NO: 13802), KASKAXX (SEQ ID NO: 13654):VPQ:EPLP-AA¹⁷-VYY (SEQ ID NO: 13802), GSAGPXX (SEQ ID NO: 13651):VPQ:EPLP-AA¹⁷-VYY (SEQ ID NO: 13802), AAPASXX (SEQ ID NO: 13646):VPQ:EPLP-AA¹⁷-VYY (SEQ ID NO: 13802), STPPTXX (SEQ ID NO: 13662):VPQ:EPLP-AA¹⁷-VYY (SEQ ID NO: 13802), HVPKPXX (SEQ ID NO: 13652):VPQ:EPLP-AA¹⁷-VYY (SEQ ID NO: 13802), RVPSTXX (SEQ ID NO: 13659):VPQ:EPLP-AA¹⁷-VYY (SEQ ID NO: 13802), ASASPXX (SEQ ID NO: 13648):VPQ:EPLP-AA¹⁷-VYY (SEQ ID NO: 13802), KIPKAXX (SEQ ID NO: 13655):VPT:EPLP-AA¹⁷-VYY (SEQ ID NO: 13802), GIPEPXX (SEQ ID NO: 13650):VPE:EPLP-AA¹⁷-VYY (SEQ ID NO: 13802), SIPKAXX (SEQ ID NO: 13660):VPT:EPLP-AA¹⁷-VYY (SEQ ID NO: 13802), HVTKPTX (SEQ ID NO: 13653):APT:EPLP-AA¹⁷-VYY (SEQ ID NO: 13802), YVPKPXX (SEQ ID NO: 13664):APT:EPLP-AA¹⁷-VYY (SEQ ID NO: 13802), TVPKPXX (SEQ ID NO: 13663):APT:EPLP-AA¹⁷-VYY (SEQ ID NO: 13802), AVPKAXX (SEQ ID NO: 13649):APT:EPLP-AA¹⁷-VYY (SEQ ID NO: 13802), KVGKAXX (SEQ ID NO: 13656):VPT:EPLP-AA¹⁷-VYY (SEQ ID NO: 13802), KASKAXX (SEQ ID NO: 13654):VPT:EPLP-AA¹⁷-VYY (SEQ ID NO: 13802), GSAGPXX (SEQ ID NO: 13651):TPT:EPLP-AA¹⁷-VYY (SEQ ID NO: 13802), AAPASXX (SEQ ID NO: 13646):VPA:EPLP-AA¹⁷-VYY (SEQ ID NO: 13802), STPPTXX (SEQ ID NO: 13662):VPT:EPLP-AA¹⁷-VYY (SEQ ID NO: 13802), HVPKPXX (SEQ ID NO: 13652):APT:EPLP-AA¹⁷-VYY (SEQ ID NO: 13802), RVPSTXX (SEQ ID NO: 13659):APV:EPLP-AA¹⁷-VYY (SEQ ID NO: 13802), ASASPXX (SEQ ID NO: 13648):VSQ:EPLP-AA¹⁷-VYY (SEQ ID NO: 13802), NDEGLEX (SEQ ID NO: 13657):VPT:EPLP-AA¹⁷-VYY (SEQ ID NO: 13802), SSVKXQP (SEQ ID NO: 13661):SRV:EPLP-AA¹⁷-VYY (SEQ ID NO: 13802), RNVQXRP (SEQ ID NO: 13658):TQV:EPLP-AA¹⁷-VYY (SEQ ID NO: 13802), KIPKAXX (SEQ ID NO: 13655):VSQ:EPLT-AA¹⁷-LYY (SEQ ID NO: 13803), GIPEPXX (SEQ ID NO: 13650):VSQ:EPLT-AA¹⁷-LYY (SEQ ID NO: 13803), SIPKAXX (SEQ ID NO: 13660):VSQ:EPLT-AA¹⁷-LYY (SEQ ID NO: 13803), HVTKPTX (SEQ ID NO: 13653):VSQ:EPLT-AA¹⁷-LYY (SEQ ID NO: 13803), YVPKPXX (SEQ ID NO: 13664):VSQ:EPLT-AA¹⁷-LYY (SEQ ID NO: 13803), TVPKPXX (SEQ ID NO: 13663):VSQ:EPLT-AA¹⁷-LYY (SEQ ID NO: 13803), AVPKAXX (SEQ ID NO: 13649):VSQ:EPLT-AA¹⁷-LYY (SEQ ID NO: 13803), KVGKAXX (SEQ ID NO: 13656):VSQ:EPLT-AA¹⁷-LYY (SEQ ID NO: 13803), KASKAXX (SEQ ID NO: 13654):VSQ:EPLT-AA¹⁷-LYY (SEQ ID NO: 13803), GSAGPXX (SEQ ID NO: 13651):VSQ:EPLT-AA¹⁷-LYY (SEQ ID NO: 13803), AAPASXX (SEQ ID NO: 13646):VSQ:EPLT-AA¹⁷-LYY (SEQ ID NO: 13803), STPPTXX (SEQ ID NO: 13662):VSQ:EPLT-AA¹⁷-LYY (SEQ ID NO: 13803), HVPKPXX (SEQ ID NO: 13652):VSQ:EPLT-AA¹⁷-LYY (SEQ ID NO: 13803), RVPSTXX (SEQ ID NO: 13659):VSQ:EPLT-AA¹⁷-LYY (SEQ ID NO: 13803), ASAAPXX (SEQ ID NO: 13647):VSQ:EPLT-AA¹⁷-LYY (SEQ ID NO: 13803), ASASPXX (SEQ ID NO: 13648):VSQ:EPLT-AA¹⁷-LYY (SEQ ID NO: 13803), KIPKAXX (SEQ ID NO: 13655):VPT:EPLT-AA¹⁷-LYY (SEQ ID NO: 13803), GIPEPXX (SEQ ID NO: 13650):VPE:EPLT-AA¹⁷-LYY (SEQ ID NO: 13803), SIPKAXX (SEQ ID NO: 13660):VPT:EPLT-AA¹⁷-LYY (SEQ ID NO: 13803), HVTKPTX (SEQ ID NO: 13653):APT:EPLT-AA¹⁷-LYY (SEQ ID NO: 13803), YVPKPXX (SEQ ID NO: 13664):APT:EPLT-AA¹⁷-LYY (SEQ ID NO: 13803), TVPKPXX (SEQ ID NO: 13663):APT:EPLT-AA¹⁷-LYY (SEQ ID NO: 13803), AVPKAXX (SEQ ID NO: 13649):APT:EPLT-AA¹⁷-LYY (SEQ ID NO: 13803), KVGKAXX (SEQ ID NO: 13656):VPT:EPLT-AA¹⁷-LYY (SEQ ID NO: 13803), KASKAXX (SEQ ID NO: 13654):VPT:EPLT-AA¹⁷-LYY (SEQ ID NO: 13803), GSAGPXX (SEQ ID NO: 13651):TPT:EPLT-AA¹⁷-LYY (SEQ ID NO: 13803), AAPASXX (SEQ ID NO: 13646):VPA:EPLT-AA¹⁷-LYY (SEQ ID NO: 13803), STPPTXX (SEQ ID NO: 13662):VPT:EPLT-AA¹⁷-LYY (SEQ ID NO: 13803), HVPKPXX (SEQ ID NO: 13652):APT:EPLT-AA¹⁷-LYY (SEQ ID NO: 13803), RVPSTXX (SEQ ID NO: 13659):APV:EPLT-AA¹⁷-LYY (SEQ ID NO: 13803), ASAAPXX (SEQ ID NO: 13647):VPQ:EPLT-AA¹⁷-LYY (SEQ ID NO: 13803), NDEGLEX (SEQ ID NO: 13657):VPT:EPLT-AA¹⁷-LYY (SEQ ID NO: 13803), SSVKXQP (SEQ ID NO: 13661):SRV:EPLT-AA¹⁷-LYY (SEQ ID NO: 13803), RNVQXRP (SEQ ID NO: 13658):TQV:EPLT-AA¹⁷-LYY (SEQ ID NO: 13803), KIPKAXX (SEQ ID NO: 13655):VPQ:EPLT-AA¹⁷-LYY (SEQ ID NO: 13803), GIPEPXX (SEQ ID NO: 13650):VPQ:EPLT-AA¹⁷-LYY (SEQ ID NO: 13803), SIPKAXX (SEQ ID NO: 13660):VPQ:EPLT-AA¹⁷-LYY (SEQ ID NO: 13803), HVTKPTX (SEQ ID NO: 13653):VPQ:EPLT-AA¹⁷-LYY (SEQ ID NO: 13803), YVPKPXX (SEQ ID NO: 13664):VPQ:EPLT-AA¹⁷-LYY (SEQ ID NO: 13803), TVPKPXX (SEQ ID NO: 13663):VPQ:EPLT-AA¹⁷-LYY (SEQ ID NO: 13803), AVPKAXX (SEQ ID NO: 13649):VPQ:EPLT-AA¹⁷-LYY (SEQ ID NO: 13803), KVGKAXX (SEQ ID NO: 13656):VPQ:EPLT-AA¹⁷-LYY (SEQ ID NO: 13803), KASKAXX (SEQ ID NO: 13654):VPQ:EPLT-AA¹⁷-LYY (SEQ ID NO: 13803), GSAGPXX (SEQ ID NO: 13651):VPQ:EPLT-AA¹⁷-LYY (SEQ ID NO: 13803), AAPASXX (SEQ ID NO: 13646):VPQ:EPLT-AA¹⁷-LYY (SEQ ID NO: 13803), STPPTXX (SEQ ID NO: 13662):VPQ:EPLT-AA¹⁷-LYY (SEQ ID NO: 13803), HVPKPXX (SEQ ID NO: 13652):VPQ:EPLT-AA¹⁷-LYY (SEQ ID NO: 13803), RVPSTXX (SEQ ID NO: 13659):VPQ:EPLT-AA¹⁷-LYY (SEQ ID NO: 13803), ASASPXX (SEQ ID NO: 13648):VPQ:EPLT-AA¹⁷-LYY (SEQ ID NO: 13803), NDEGLEX (SEQ ID NO: 13657):VPT:SNIT-AA¹⁷-QIM (SEQ ID NO: 13810), GIPEPXX (SEQ ID NO: 13650):VPE:SNIT-AA¹⁷-QIM (SEQ ID NO: 13810), HVTKPTX (SEQ ID NO: 13653):APT:SNIT-AA¹⁷-QIM (SEQ ID NO: 13810), YVPKPXX (SEQ ID NO: 13664):APT:SNIT-AA¹⁷-QIM (SEQ ID NO: 13810), TVPKPXX (SEQ ID NO: 13663):APT:SNIT-AA¹⁷-QIM (SEQ ID NO: 13810), AVPKAXX (SEQ ID NO: 13649):APT:SNIT-AA¹⁷-QIM (SEQ ID NO: 13810), GSAGPXX (SEQ ID NO: 13651):TPT:SNIT-AA¹⁷-QIM (SEQ ID NO: 13810), AAPASXX (SEQ ID NO: 13646):VPA:SNIT-AA¹⁷-QIM (SEQ ID NO: 13810), HVPKPXX (SEQ ID NO: 13652):APT:SNIT-AA¹⁷-QIM (SEQ ID NO: 13810), RVPSTXX (SEQ ID NO: 13659):APV:SNIT-AA¹⁷-QIM (SEQ ID NO: 13810), ASAAPXX (SEQ ID NO: 13647):VPQ:SNIT-AA¹⁷-QIM (SEQ ID NO: 13810), ASASPXX (SEQ ID NO: 13648):VSQ:SNIT-AA¹⁷-QIM (SEQ ID NO: 13810), ASASPXX (SEQ ID NO: 13648):VPQ:SNIT-AA¹⁷-QIM (SEQ ID NO: 13810), SSVKXQP (SEQ ID NO: 13661):SRV:SNIT-AA¹⁷-QIM (SEQ ID NO: 13810), RNVQXRP (SEQ ID NO: 13658):TQV:SNIT-AA¹⁷-QIM (SEQ ID NO: 13810), RNVQXRP (SEQ ID NO: 13658):SRV:RSVK-AA¹⁷-AKV (SEQ ID NO: 13807), KIPKAXX (SEQ ID NO: 13655):VPT:RSVK-AA¹⁷-AKV (SEQ ID NO: 13807), GIPEPXX (SEQ ID NO: 13650):VPE:RSVK-AA¹⁷-AKV (SEQ ID NO: 13807), SIPKAXX (SEQ ID NO: 13660):VPT:RSVK-AA¹⁷-AKV (SEQ ID NO: 13807), HVTKPTX (SEQ ID NO: 13653):APT:RSVK-AA¹⁷-AKV (SEQ ID NO: 13807), YVPKPXX (SEQ ID NO: 13664):APT:RSVK-AA¹⁷-AKV (SEQ ID NO: 13807), TVPKPXX (SEQ ID NO: 13663):APT:RSVK-AA¹⁷-AKV (SEQ ID NO: 13807), AVPKAXX (SEQ ID NO: 13649):APT:RSVK-AA¹⁷-AKV (SEQ ID NO: 13807), KVGKAXX (SEQ ID NO: 13656):VPT:RSVK-AA¹⁷-AKV (SEQ ID NO: 13807), KASKAXX (SEQ ID NO: 13654):VPT:RSVK-AA¹⁷-AKV (SEQ ID NO: 13807), GSAGPXX (SEQ ID NO: 13651):TPT:RSVK-AA¹⁷-AKV (SEQ ID NO: 13807), AAPASXX (SEQ ID NO: 13646):VPA:RSVK-AA¹⁷-AKV (SEQ ID NO: 13807), STPPTXX (SEQ ID NO: 13662):VPT:RSVK-AA¹⁷-AKV (SEQ ID NO: 13807), HVPKPXX (SEQ ID NO: 13652):APT:RSVK-AA¹⁷-AKV (SEQ ID NO: 13807), RVPSTXX (SEQ ID NO: 13659):APV:RSVK-AA¹⁷-AKV (SEQ ID NO: 13807), ASAAPXX (SEQ ID NO: 13647):VPQ:RSVK-AA¹⁷-AKV (SEQ ID NO: 13807), ASASPXX (SEQ ID NO: 13648):VSQ:RSVK-AA¹⁷-AKV (SEQ ID NO: 13807), ASASPXX (SEQ ID NO: 13648):VPQ:RSVK-AA¹⁷-AKV (SEQ ID NO: 13807), NDEGLEX (SEQ ID NO: 13657):VPT:RSVK-AA¹⁷-AKV (SEQ ID NO: 13807), RNVQXRP (SEQ ID NO: 13658):TQV:RSVK-AA¹⁷-AKV (SEQ ID NO: 13807), SSVKXQP (SEQ ID NO: 13661):TQV:RPVQ-AA¹⁷-RKI (SEQ ID NO: 13806), KIPKAXX (SEQ ID NO: 13655):VPT:RPVQ-AA¹⁷-RKI (SEQ ID NO: 13806), GIPEPXX (SEQ ID NO: 13650):VPE:RPVQ-AA¹⁷-RKI (SEQ ID NO: 13806), SIPKAXX (SEQ ID NO: 13660):VPT:RPVQ-AA¹⁷-RKI (SEQ ID NO: 13806), HVTKPTX (SEQ ID NO: 13653):APT:RPVQ-AA¹⁷-RKI (SEQ ID NO: 13806), YVPKPXX (SEQ ID NO: 13664):APT:RPVQ-AA¹⁷-RKI (SEQ ID NO: 13806), TVPKPXX (SEQ ID NO: 13663):APT:RPVQ-AA¹⁷-RKI (SEQ ID NO: 13806), AVPKAXX (SEQ ID NO: 13649):APT:RPVQ-AA¹⁷-RKI (SEQ ID NO: 13806), KVGKAXX (SEQ ID NO: 13656):VPT:RPVQ-AA¹⁷-RKI (SEQ ID NO: 13806), KASKAXX (SEQ ID NO: 13654):VPT:RPVQ-AA¹⁷-RKI (SEQ ID NO: 13806), GSAGPXX (SEQ ID NO: 13651):TPT:RPVQ-AA¹⁷-RKI (SEQ ID NO: 13806), AAPASXX (SEQ ID NO: 13646):VPA:RPVQ-AA¹⁷-RKI (SEQ ID NO: 13806), STPPTXX (SEQ ID NO: 13662):VPT:RPVQ-AA¹⁷-RKI (SEQ ID NO: 13806), HVPKPXX (SEQ ID NO: 13652):APT:RPVQ-AA¹⁷-RKI (SEQ ID NO: 13806), RVPSTXX (SEQ ID NO: 13659):APV:RPVQ-AA¹⁷-RKI (SEQ ID NO: 13806), ASAAPXX (SEQ ID NO: 13647):VPQ:RPVQ-AA¹⁷-RKI (SEQ ID NO: 13806), ASASPXX (SEQ ID NO: 13648):VSQ:RPVQ-AA¹⁷-RKI (SEQ ID NO: 13806), ASASPXX (SEQ ID NO: 13648):VPQ:RPVQ-AA¹⁷-RKI (SEQ ID NO: 13806), NDEGLEX (SEQ ID NO: 13657):VPT:RPVQ-AA¹⁷-RKI (SEQ ID NO: 13806) and SSVKXQP (SEQ ID NO: 13661):SRV:RPVQ-AA¹⁷-RKI (SEQ ID NO: 13806); and wherein AA¹⁷ is selected from the group consisting of G, A, V, L, I, P, F, M, W, T and S (in particular is selected from the group consisting of M, I, L, V and T).

[0384] In certain embodiments, the triplet PEP7:PEP5:PEP1 is selected from the group consisting of GIPEPXX (SEQ ID NO: 13650):VPTKM (SEQ ID NO: 13634):SAIS (SEQ ID NO: 13570), HVTKPTX (SEQ ID NO: 13653):VPTKL (SEQ ID NO: 13633):SAIS (SEQ ID NO: 13570), YVPKPXX (SEQ ID NO: 13664):VPTKL (SEQ ID NO: 13633):SAIS (SEQ ID NO: 13570), TVPKPXX (SEQ ID NO: 13663):VPTQL (SEQ ID NO: 13636):SAIS (SEQ ID NO: 13570), AVPKAXX (SEQ ID NO: 13649):VPTKL (SEQ ID NO: 13633):SAIS (SEQ ID NO: 13570), KVGKAXX (SEQ ID NO: 13656):VPTKL (SEQ ID NO: 13633):SAIS (SEQ ID NO: 13570), KASKAXX (SEQ ID NO: 13654):VPTKL (SEQ ID NO: 13633):SAIS (SEQ ID NO: 13570), GSAGPXX (SEQ ID NO: 13651):VPTKM (SEQ ID NO: 13634):SAIS (SEQ ID NO: 13570), AAPASXX (SEQ ID NO: 13646):VPTRL (SEQ ID NO: 13637):SAIS (SEQ ID NO: 13570), STPPTXX (SEQ ID NO: 13662):VPTRL (SEQ ID NO: 13637):SAIS (SEQ ID NO: 13570), HVPKPXX (SEQ ID NO: 13652):VPTKL (SEQ ID NO: 13633):SAIS (SEQ ID NO: 13570), RVPSTXX (SEQ ID NO: 13659):VPTKT (SEQ ID NO: 13635):SAIS (SEQ ID NO: 13570), ASAAPXX (SEQ ID NO: 13647):VPTAL (SEQ ID NO: 13628):SAIS (SEQ ID NO: 13570), ASASPXX (SEQ ID NO: 13648):VPTDL (SEQ ID NO: 13629):SAIS (SEQ ID NO: 13570), GIPEPXX (SEQ ID NO: 13650):VPEKM (SEQ ID NO: 13616):SAIS (SEQ ID NO: 13570), HVTKPTX (SEQ ID NO: 13653):APTKL (SEQ ID NO: 13579):SAIS (SEQ ID NO: 13570), YVPKPXX (SEQ ID NO: 13664):APTKL (SEQ ID NO: 13579):SAIS (SEQ ID NO: 13570), TVPKPXX (SEQ ID NO: 13663):APTQL (SEQ ID NO: 13582):SAIS (SEQ ID NO: 13570), AVPKAXX (SEQ ID NO: 13649):APTKL (SEQ ID NO: 13579):SAIS (SEQ ID NO: 13570), GSAGPXX (SEQ ID NO: 13651):TPTKM (SEQ ID NO: 13598):SAIS (SEQ ID NO: 13570), AAPASXX (SEQ ID NO: 13646):VPARL (SEQ ID NO: 13611):SAIS (SEQ ID NO: 13570), HVPKPXX (SEQ ID NO: 13652):APTKL (SEQ ID NO: 13579):SAIS (SEQ ID NO: 13570), RVPSTXX (SEQ ID NO: 13659):APVKT (SEQ ID NO: 13589):SAIS (SEQ ID NO: 13570), ASAAPXX (SEQ ID NO: 13647):VPQAL (SEQ ID NO: 13620):SAIS (SEQ ID NO: 13570), ASASPXX (SEQ ID NO: 13648):VSQDL (SEQ ID NO: 13639):SAIS (SEQ ID NO: 13570), ASASPXX (SEQ ID NO: 13648):VPQDL (SEQ ID NO: 13621):SAIS (SEQ ID NO: 13570), SSVKXQP (SEQ ID NO: 13661):SRVHH (SEQ ID NO: 13592):SAIS (SEQ ID NO: 13570), RNVQXRP (SEQ ID NO: 13658):TQVQL (SEQ ID NO: 13603):SAIS (SEQ ID NO: 13570), KIPKAXX (SEQ ID NO: 13655):VPEEL (SEQ ID NO: 13614):SSLS (SEQ ID NO: 13575), SIPKAXX (SEQ ID NO: 13660):VPEEL (SEQ ID NO: 13614):SSLS (SEQ ID NO: 13575), HVTKPTX (SEQ ID NO: 13653):VPEKL (SEQ ID NO: 13615):SSLS (SEQ ID NO: 13575), YVPKPXX (SEQ ID NO: 13664):VPEKL (SEQ ID NO: 13615):SSLS (SEQ ID NO: 13575), TVPKPXX (SEQ ID NO: 13663):VPEQL (SEQ ID NO: 13618):SSLS (SEQ ID NO: 13575), AVPKAXX (SEQ ID NO: 13649):VPEKL (SEQ ID NO: 13615):SSLS (SEQ ID NO: 13575), KVGKAXX (SEQ ID NO: 13656):VPEKL (SEQ ID NO: 13615):SSLS (SEQ ID NO: 13575), KASKAXX (SEQ ID NO: 13654):VPEKL (SEQ ID NO: 13615):SSLS (SEQ ID NO: 13575), GSAGPXX (SEQ ID NO: 13651):VPEKM (SEQ ID NO: 13616):SSLS (SEQ ID NO: 13575), AAPASXX (SEQ ID NO: 13646):VPERL (SEQ ID NO: 13619):SSLS (SEQ ID NO: 13575), STPPTXX (SEQ ID NO: 13662):VPERL (SEQ ID NO: 13619):SSLS (SEQ ID NO: 13575), HVPKPXX (SEQ ID NO: 13652):VPEKL (SEQ ID NO: 13615):SSLS (SEQ ID NO: 13575), RVPSTXX (SEQ ID NO: 13659):VPEKT (SEQ ID NO: 13617):SSLS (SEQ ID NO: 13575), ASAAPXX (SEQ ID NO: 13647):VPEAL (SEQ ID NO: 13612):SSLS (SEQ ID NO: 13575), ASASPXX (SEQ ID NO: 13648):VPEDL (SEQ ID NO: 13613):SSLS (SEQ ID NO: 13575), KIPKAXX (SEQ ID NO: 13655):VPTEL (SEQ ID NO: 13631):SSLS (SEQ ID NO: 13575), SIPKAXX (SEQ ID NO: 13660):VPTEL (SEQ ID NO: 13631):SSLS (SEQ ID NO: 13575), HVTKPTX (SEQ ID NO: 13653):APTKL (SEQ ID NO: 13579):SSLS (SEQ ID NO: 13575), YVPKPXX (SEQ ID NO: 13664):APTKL (SEQ ID NO: 13579):SSLS (SEQ ID NO: 13575), TVPKPXX (SEQ ID NO: 13663):APTQL (SEQ ID NO: 13582):SSLS (SEQ ID NO: 13575), AVPKAXX (SEQ ID NO: 13649):APTKL (SEQ ID NO: 13579):SSLS (SEQ ID NO: 13575), KVGKAXX (SEQ ID NO: 13656):VPTKL (SEQ ID NO: 13633):SSLS (SEQ ID NO: 13575), KASKAXX (SEQ ID NO: 13654):VPTKL (SEQ ID NO: 13633):SSLS (SEQ ID NO: 13575), GSAGPXX (SEQ ID NO: 13651):TPTKM (SEQ ID NO: 13598):SSLS (SEQ ID NO: 13575), AAPASXX (SEQ ID NO: 13646):VPARL (SEQ ID NO: 13611):SSLS (SEQ ID NO: 13575), STPPTXX (SEQ ID NO: 13662):VPTRL (SEQ ID NO: 13637):SSLS (SEQ ID NO: 13575), HVPKPXX (SEQ ID NO: 13652):APTKL (SEQ ID NO: 13579):SSLS (SEQ ID NO: 13575), RVPSTXX (SEQ ID NO: 13659):APVKT (SEQ ID NO: 13589):SSLS (SEQ ID NO: 13575), ASAAPXX (SEQ ID NO: 13647):VPQAL (SEQ ID NO: 13620):SSLS (SEQ ID NO: 13575), ASASPXX (SEQ ID NO: 13648):VSQDL (SEQ ID NO: 13639):SSLS (SEQ ID NO: 13575), ASASPXX (SEQ ID NO: 13648):VPQDL (SEQ ID NO: 13621):SSLS (SEQ ID NO: 13575), NDEGLEX (SEQ ID NO: 13657):VPTEE (SEQ ID NO: 13630):SSLS (SEQ ID NO: 13575), NDEGLEX (SEQ ID NO: 13657):VPTGQ (SEQ ID NO: 13632):SSLS (SEQ ID NO: 13575), SSVKXQP (SEQ ID NO: 13661):SRVHH (SEQ ID NO: 13592):SSLS (SEQ ID NO: 13575), RNVQXRP (SEQ ID NO: 13658):TQVQL (SEQ ID NO: 13603):SSLS (SEQ ID NO: 13575), KIPKAXX (SEQ ID NO: 13655):APTEL (SEQ ID NO: 13578):NAIS (SEQ ID NO: 13567), GIPEPXX (SEQ ID NO: 13650):APTKM (SEQ ID NO: 13580):NAIS (SEQ ID NO: 13567), SIPKAXX (SEQ ID NO: 13660):APTEL (SEQ ID NO: 13578):NAIS (SEQ ID NO: 13567), AVPKAXX (SEQ ID NO: 13649):APTKL (SEQ ID NO: 13579):NAIS (SEQ ID NO: 13567), KVGKAXX (SEQ ID NO: 13656):APTKL (SEQ ID NO: 13579):NAIS (SEQ ID NO: 13567), KASKAXX (SEQ ID NO: 13654):APTKL (SEQ ID NO: 13579):NAIS (SEQ ID NO: 13567), GSAGPXX (SEQ ID NO: 13651):APTKM (SEQ ID NO: 13580):NAIS (SEQ ID NO: 13567), AAPASXX (SEQ ID NO: 13646):APTRL (SEQ ID NO: 13583):NAIS (SEQ ID NO: 13567), STPPTXX (SEQ ID NO: 13662):APTRL (SEQ ID NO: 13583):NAIS (SEQ ID NO: 13567), RVPSTXX (SEQ ID NO: 13659):APTKT (SEQ ID NO: 13581):NAIS (SEQ ID NO: 13567), ASAAPXX (SEQ ID NO: 13647):APTAL (SEQ ID NO: 13576):NAIS (SEQ ID NO: 13567), ASASPXX (SEQ ID NO: 13648):APTDL (SEQ ID NO: 13577):NAIS (SEQ ID NO: 13567), KIPKAXX (SEQ ID NO: 13655):VPTEL (SEQ ID NO: 13631):NAIS (SEQ ID NO: 13567), GIPEPXX (SEQ ID NO: 13650):VPEKM (SEQ ID NO: 13616):NAIS (SEQ ID NO: 13567), SIPKAXX (SEQ ID NO: 13660):VPTEL (SEQ ID NO: 13631):NAIS (SEQ ID NO: 13567), KVGKAXX (SEQ ID NO: 13656):VPTKL (SEQ ID NO: 13633):NAIS (SEQ ID NO: 13567), KASKAXX (SEQ ID NO: 13654):VPTKL (SEQ ID NO: 13633):NAIS (SEQ ID NO: 13567), GSAGPXX (SEQ ID NO: 13651):TPTKM (SEQ ID NO: 13598):NAIS (SEQ ID NO: 13567), AAPASXX (SEQ ID NO: 13646):VPARL (SEQ ID NO: 13611):NAIS (SEQ ID NO: 13567), STPPTXX (SEQ ID NO: 13662):VPTRL (SEQ ID NO: 13637):NAIS (SEQ ID NO: 13567), RVPSTXX (SEQ ID NO: 13659):APVKT (SEQ ID NO: 13589):NAIS (SEQ ID NO: 13567), ASAAPXX (SEQ ID NO: 13647):VPQAL (SEQ ID NO: 13620):NAIS (SEQ ID NO: 13567), ASASPXX (SEQ ID NO: 13648):VSQDL (SEQ ID NO: 13639):NAIS (SEQ ID NO: 13567), ASASPXX (SEQ ID NO: 13648):VPQDL (SEQ ID NO: 13621):NAIS (SEQ ID NO: 13567), NDEGLEX (SEQ ID NO: 13657):VPTEE (SEQ ID NO: 13630):NAIS (SEQ ID NO: 13567), NDEGLEX (SEQ ID NO: 13657):VPTGQ (SEQ ID NO: 13632):NAIS (SEQ ID NO: 13567), SSVKXQP (SEQ ID NO: 13661):SRVHH (SEQ ID NO: 13592):NAIS (SEQ ID NO: 13567), RNVQXRP (SEQ ID NO: 13658):TQVQL (SEQ ID NO: 13603):NAIS (SEQ ID NO: 13567), KIPKAXX (SEQ ID NO: 13655):APTEL (SEQ ID NO: 13578):SATS (SEQ ID NO: 13571), GIPEPXX (SEQ ID NO: 13650):APTKM (SEQ ID NO: 13580):SATS (SEQ ID NO: 13571), SIPKAXX (SEQ ID NO: 13660):APTEL (SEQ ID NO: 13578):SATS (SEQ ID NO: 13571), HVTKPTX (SEQ ID NO: 13653):APTKL (SEQ ID NO: 13579):SATS (SEQ ID NO: 13571), YVPKPXX (SEQ ID NO: 13664):APTKL (SEQ ID NO: 13579):SATS (SEQ ID NO: 13571), TVPKPXX (SEQ ID NO: 13663):APTQL (SEQ ID NO: 13582):SATS (SEQ ID NO: 13571), KVGKAXX (SEQ ID NO: 13656):APTKL (SEQ ID NO: 13579):SATS (SEQ ID NO: 13571), KASKAXX (SEQ ID NO: 13654):APTKL (SEQ ID NO: 13579):SATS (SEQ ID NO: 13571), GSAGPXX (SEQ ID NO: 13651):APTKM (SEQ ID NO: 13580):SATS (SEQ ID NO: 13571), AAPASXX (SEQ ID NO: 13646):APTRL (SEQ ID NO: 13583):SATS (SEQ ID NO: 13571), STPPTXX (SEQ ID NO: 13662):APTRL (SEQ ID NO: 13583):SATS (SEQ ID NO: 13571), HVPKPXX (SEQ ID NO: 13652):APTKL (SEQ ID NO: 13579):SATS (SEQ ID NO: 13571), RVPSTXX (SEQ ID NO: 13659):APTKT (SEQ ID NO: 13581):SATS (SEQ ID NO: 13571), ASAAPXX (SEQ ID NO: 13647):APTAL (SEQ ID NO: 13576):SATS (SEQ ID NO: 13571), ASASPXX (SEQ ID NO: 13648):APTDL (SEQ ID NO: 13577):SATS (SEQ ID NO: 13571), KIPKAXX (SEQ ID NO: 13655):VPTEL (SEQ ID NO: 13631):SATS (SEQ ID NO: 13571), GIPEPXX (SEQ ID NO: 13650):VPEKM (SEQ ID NO: 13616):SATS (SEQ ID NO: 13571), SIPKAXX (SEQ ID NO: 13660):VPTEL (SEQ ID NO: 13631):SATS (SEQ ID NO: 13571), KVGKAXX (SEQ ID NO: 13656):VPTKL (SEQ ID NO: 13633):SATS (SEQ ID NO: 13571), KASKAXX (SEQ ID NO: 13654):VPTKL (SEQ ID NO: 13633):SATS (SEQ ID NO: 13571), GSAGPXX (SEQ ID NO: 13651):TPTKM (SEQ ID NO: 13598):SATS (SEQ ID NO: 13571), AAPASXX (SEQ ID NO: 13646):VPARL (SEQ ID NO: 13611):SATS (SEQ ID NO: 13571), STPPTXX (SEQ ID NO: 13662):VPTRL (SEQ ID NO: 13637):SATS (SEQ ID NO: 13571), RVPSTXX (SEQ ID NO: 13659):APVKT (SEQ ID NO: 13589):SATS (SEQ ID NO: 13571), ASAAPXX (SEQ ID NO: 13647):VPQAL (SEQ ID NO: 13620):SATS (SEQ ID NO: 13571), ASASPXX (SEQ ID NO: 13648):VSQDL (SEQ ID NO: 13639):SATS (SEQ ID NO: 13571), ASASPXX (SEQ ID NO: 13648):VPQDL (SEQ ID NO: 13621):SATS (SEQ ID NO: 13571), NDEGLEX (SEQ ID NO: 13657):VPTEE (SEQ ID NO: 13630):SATS (SEQ ID NO: 13571), NDEGLEX (SEQ ID NO: 13657):VPTGQ (SEQ ID NO: 13632):SATS (SEQ ID NO: 13571), SSVKXQP (SEQ ID NO: 13661):SRVHH (SEQ ID NO: 13592):SATS (SEQ ID NO: 13571), RNVQXRP (SEQ ID NO: 13658):TQVQL (SEQ ID NO: 13603):SATS (SEQ ID NO: 13571), KIPKAXX (SEQ ID NO: 13655):VPTEL (SEQ ID NO: 13631):SPIS (SEQ ID NO: 13574), GIPEPXX (SEQ ID NO: 13650):VPTKM (SEQ ID NO: 13634):SPIS (SEQ ID NO: 13574), SIPKAXX (SEQ ID NO: 13660):VPTEL (SEQ ID NO: 13631):SPIS (SEQ ID NO: 13574), HVTKPTX (SEQ ID NO: 13653):VPTKL (SEQ ID NO: 13633):SPIS (SEQ ID NO: 13574), YVPKPXX (SEQ ID NO: 13664):VPTKL (SEQ ID NO: 13633):SPIS (SEQ ID NO: 13574), TVPKPXX (SEQ ID NO: 13663):VPTQL (SEQ ID NO: 13636):SPIS (SEQ ID NO: 13574), AVPKAXX (SEQ ID NO: 13649):VPTKL (SEQ ID NO: 13633):SPIS (SEQ ID NO: 13574), KASKAXX (SEQ ID NO: 13654):VPTKL (SEQ ID NO: 13633):SPIS (SEQ ID NO: 13574), GSAGPXX (SEQ ID NO: 13651):VPTKM (SEQ ID NO: 13634):SPIS (SEQ ID NO: 13574), AAPASXX (SEQ ID NO: 13646):VPTRL (SEQ ID NO: 13637):SPIS (SEQ ID NO: 13574), STPPTXX (SEQ ID NO: 13662):VPTRL (SEQ ID NO: 13637):SPIS (SEQ ID NO: 13574), HVPKPXX (SEQ ID NO: 13652):VPTKL (SEQ ID NO: 13633):SPIS (SEQ ID NO: 13574), RVPSTXX (SEQ ID NO: 13659):VPTKT (SEQ ID NO: 13635):SPIS (SEQ ID NO: 13574), ASAAPXX (SEQ ID NO: 13647):VPTAL (SEQ ID NO: 13628):SPIS (SEQ ID NO: 13574), ASASPXX (SEQ ID NO: 13648):VPTDL (SEQ ID NO: 13629):SPIS (SEQ ID NO: 13574), GIPEPXX (SEQ ID NO: 13650):VPEKM (SEQ ID NO: 13616):SPIS (SEQ ID NO: 13574), HVTKPTX (SEQ ID NO: 13653):APTKL (SEQ ID NO: 13579):SPIS (SEQ ID NO: 13574), YVPKPXX (SEQ ID NO: 13664):APTKL (SEQ ID NO: 13579):SPIS (SEQ ID NO: 13574), TVPKPXX (SEQ ID NO: 13663):APTQL (SEQ ID NO: 13582):SPIS (SEQ ID NO: 13574), AVPKAXX (SEQ ID NO: 13649):APTKL (SEQ ID NO: 13579):SPIS (SEQ ID NO: 13574), GSAGPXX (SEQ ID NO: 13651):TPTKM (SEQ ID NO: 13598):SPIS (SEQ ID NO: 13574), AAPASXX (SEQ ID NO: 13646):VPARL (SEQ ID NO: 13611):SPIS (SEQ ID NO: 13574), HVPKPXX (SEQ ID NO: 13652):APTKL (SEQ ID NO: 13579):SPIS (SEQ ID NO: 13574), RVPSTXX (SEQ ID NO: 13659):APVKT (SEQ ID NO: 13589):SPIS (SEQ ID NO: 13574), ASAAPXX (SEQ ID NO: 13647):VPQAL (SEQ ID NO: 13620):SPIS (SEQ ID NO: 13574), ASASPXX (SEQ ID NO: 13648):VSQDL (SEQ ID NO: 13639):SPIS (SEQ ID NO: 13574), ASASPXX (SEQ ID NO: 13648):VPQDL (SEQ ID NO: 13621):SPIS (SEQ ID NO: 13574), SSVKXQP (SEQ ID NO: 13661):SRVHH (SEQ ID NO: 13592):SPIS (SEQ ID NO: 13574), RNVQXRP (SEQ ID NO: 13658):TQVQL (SEQ ID NO: 13603):SPIS (SEQ ID NO: 13574), KIPKAXX (SEQ ID NO: 13655):VPTEL (SEQ ID NO: 13631):EPIS (SEQ ID NO: 13563), GIPEPXX (SEQ ID NO: 13650):VPTKM (SEQ ID NO: 13634):EPIS (SEQ ID NO: 13563), SIPKAXX (SEQ ID NO: 13660):VPTEL (SEQ ID NO: 13631):EPIS (SEQ ID NO: 13563), HVTKPTX (SEQ ID NO: 13653):VPTKL (SEQ ID NO: 13633):EPIS (SEQ ID NO: 13563), YVPKPXX (SEQ ID NO: 13664):VPTKL (SEQ ID NO: 13633):EPIS (SEQ ID NO: 13563), TVPKPXX (SEQ ID NO: 13663):VPTQL (SEQ ID NO: 13636):EPIS (SEQ ID NO: 13563), AVPKAXX (SEQ ID NO: 13649):VPTKL (SEQ ID NO: 13633):EPIS (SEQ ID NO: 13563), KVGKAXX (SEQ ID NO: 13656):VPTKL (SEQ ID NO: 13633):EPIS (SEQ ID NO: 13563), GSAGPXX (SEQ ID NO: 13651):VPTKM (SEQ ID NO: 13634):EPIS (SEQ ID NO: 13563), AAPASXX (SEQ ID NO: 13646):VPTRL (SEQ ID NO: 13637):EPIS (SEQ ID NO: 13563), STPPTXX (SEQ ID NO: 13662):VPTRL (SEQ ID NO: 13637):EPIS (SEQ ID NO: 13563), HVPKPXX (SEQ ID NO: 13652):VPTKL (SEQ ID NO: 13633):EPIS (SEQ ID NO: 13563), RVPSTXX (SEQ ID NO: 13659):VPTKT (SEQ ID NO: 13635):EPIS (SEQ ID NO: 13563), ASAAPXX (SEQ ID NO: 13647):VPTAL (SEQ ID NO: 13628):EPIS (SEQ ID NO: 13563), ASASPXX (SEQ ID NO: 13648):VPTDL (SEQ ID NO: 13629):EPIS (SEQ ID NO: 13563), GIPEPXX (SEQ ID NO: 13650):VPEKM (SEQ ID NO: 13616):EPIS (SEQ ID NO: 13563), HVTKPTX (SEQ ID NO: 13653):APTKL (SEQ ID NO: 13579):EPIS (SEQ ID NO: 13563), YVPKPXX (SEQ ID NO: 13664):APTKL (SEQ ID NO: 13579):EPIS (SEQ ID NO: 13563), TVPKPXX (SEQ ID NO: 13663):APTQL (SEQ ID NO: 13582):EPIS (SEQ ID NO: 13563), AVPKAXX (SEQ ID NO: 13649):APTKL (SEQ ID NO: 13579):EPIS (SEQ ID NO: 13563), GSAGPXX (SEQ ID NO: 13651):TPTKM (SEQ ID NO: 13598):EPIS (SEQ ID NO: 13563), AAPASXX (SEQ ID NO: 13646):VPARL (SEQ ID NO: 13611):EPIS (SEQ ID NO: 13563), HVPKPXX (SEQ ID NO: 13652):APTKL (SEQ ID NO: 13579):EPIS (SEQ ID NO: 13563), RVPSTXX (SEQ ID NO: 13659):APVKT (SEQ ID NO: 13589):EPIS (SEQ ID NO: 13563), ASAAPXX (SEQ ID NO: 13647):VPQAL (SEQ ID NO: 13620):EPIS (SEQ ID NO: 13563), ASASPXX (SEQ ID NO: 13648):VSQDL (SEQ ID NO: 13639):EPIS (SEQ ID NO: 13563), ASASPXX (SEQ ID NO: 13648):VPQDL (SEQ ID NO: 13621):EPIS (SEQ ID NO: 13563), SSVKXQP (SEQ ID NO: 13661):SRVHH (SEQ ID NO: 13592):EPIS (SEQ ID NO: 13563), RNVQXRP (SEQ ID NO: 13658):TQVQL (SEQ ID NO: 13603):EPIS (SEQ ID NO: 13563), KIPKAXX (SEQ ID NO: 13655):TPTEL (SEQ ID NO: 13596):SPIN (SEQ ID NO: 13573), GIPEPXX (SEQ ID NO: 13650):TPTKM (SEQ ID NO: 13598):SPIN (SEQ ID NO: 13573), SIPKAXX (SEQ ID NO: 13660):TPTEL (SEQ ID NO: 13596):SPIN (SEQ ID NO: 13573), HVTKPTX (SEQ ID NO: 13653):TPTKL (SEQ ID NO: 13597):SPIN (SEQ ID NO: 13573), YVPKPXX (SEQ ID NO: 13664):TPTKL (SEQ ID NO: 13597):SPIN (SEQ ID NO: 13573), TVPKPXX (SEQ ID NO: 13663):TPTQL (SEQ ID NO: 13600):SPIN (SEQ ID NO: 13573), AVPKAXX (SEQ ID NO: 13649):TPTKL (SEQ ID NO: 13597):SPIN (SEQ ID NO: 13573), KVGKAXX (SEQ ID NO: 13656):TPTKL (SEQ ID NO: 13597):SPIN (SEQ ID NO: 13573), KASKAXX (SEQ ID NO: 13654):TPTKL (SEQ ID NO: 13597):SPIN (SEQ ID NO: 13573), AAPASXX (SEQ ID NO: 13646):TPTRL (SEQ ID NO: 13601):SPIN (SEQ ID NO: 13573), STPPTXX (SEQ ID NO: 13662):TPTRL (SEQ ID NO: 13601):SPIN (SEQ ID NO: 13573), HVPKPXX (SEQ ID NO: 13652):TPTKL (SEQ ID NO: 13597):SPIN (SEQ ID NO: 13573), RVPSTXX (SEQ ID NO: 13659):TPTKT (SEQ ID NO: 13599):SPIN (SEQ ID NO: 13573), ASAAPXX (SEQ ID NO: 13647):TPTAL (SEQ ID NO: 13594):SPIN (SEQ ID NO: 13573), ASASPXX (SEQ ID NO: 13648):TPTDL (SEQ ID NO: 13595):SPIN (SEQ ID NO: 13573), KIPKAXX (SEQ ID NO: 13655):VPTEL (SEQ ID NO: 13631):SPIN (SEQ ID NO: 13573), GIPEPXX (SEQ ID NO: 13650):VPEKM (SEQ ID NO: 13616):SPIN (SEQ ID NO: 13573), SIPKAXX (SEQ ID NO: 13660):VPTEL (SEQ ID NO: 13631):SPIN (SEQ ID NO: 13573), HVTKPTX (SEQ ID NO: 13653):APTKL (SEQ ID NO: 13579):SPIN (SEQ ID NO: 13573), YVPKPXX (SEQ ID NO: 13664):APTKL (SEQ ID NO: 13579):SPIN (SEQ ID NO: 13573), TVPKPXX (SEQ ID NO: 13663):APTQL (SEQ ID NO: 13582):SPIN (SEQ ID NO: 13573), AVPKAXX (SEQ ID NO: 13649):APTKL (SEQ ID NO: 13579):SPIN (SEQ ID NO: 13573), KVGKAXX (SEQ ID NO: 13656):VPTKL (SEQ ID NO: 13633):SPIN (SEQ ID NO: 13573), KASKAXX (SEQ ID NO: 13654):VPTKL (SEQ ID NO: 13633):SPIN (SEQ ID NO: 13573), AAPASXX (SEQ ID NO: 13646):VPARL (SEQ ID NO: 13611):SPIN (SEQ ID NO: 13573), STPPTXX (SEQ ID NO: 13662):VPTRL (SEQ ID NO: 13637):SPIN (SEQ ID NO: 13573), HVPKPXX (SEQ ID NO: 13652):APTKL (SEQ ID NO: 13579):SPIN (SEQ ID NO: 13573), RVPSTXX (SEQ ID NO: 13659):APVKT (SEQ ID NO: 13589):SPIN (SEQ ID NO: 13573), ASAAPXX (SEQ ID NO: 13647):VPQAL (SEQ ID NO: 13620):SPIN (SEQ ID NO: 13573), ASASPXX (SEQ ID NO: 13648):VSQDL (SEQ ID NO: 13639):SPIN (SEQ ID NO: 13573), ASASPXX (SEQ ID NO: 13648):VPQDL (SEQ ID NO: 13621):SPIN (SEQ ID NO: 13573), NDEGLEX (SEQ ID NO: 13657):VPTEE (SEQ ID NO: 13630):SPIN (SEQ ID NO: 13573), NDEGLEX (SEQ ID NO: 13657):VPTGQ (SEQ ID NO: 13632):SPIN (SEQ ID NO: 13573), SSVKXQP (SEQ ID NO: 13661):SRVHH (SEQ ID NO: 13592):SPIN (SEQ ID NO: 13573), RNVQXRP (SEQ ID NO: 13658):TQVQL (SEQ ID NO: 13603):SPIN (SEQ ID NO: 13573), KIPKAXX (SEQ ID NO: 13655):VPAEL (SEQ ID NO: 13606):SPIS (SEQ ID NO: 13574), GIPEPXX (SEQ ID NO: 13650):VPAKM (SEQ ID NO: 13608):SPIS (SEQ ID NO: 13574), SIPKAXX (SEQ ID NO: 13660):VPAEL (SEQ ID NO: 13606):SPIS (SEQ ID NO: 13574), HVTKPTX (SEQ ID NO: 13653):VPAKL (SEQ ID NO: 13607):SPIS (SEQ ID NO: 13574), YVPKPXX (SEQ ID NO: 13664):VPAKL (SEQ ID NO: 13607):SPIS (SEQ ID NO: 13574), TVPKPXX (SEQ ID NO: 13663):VPAQL (SEQ ID NO: 13610):SPIS (SEQ ID NO: 13574), AVPKAXX (SEQ ID NO: 13649):VPAKL (SEQ ID NO: 13607):SPIS (SEQ ID NO: 13574), KVGKAXX (SEQ ID NO: 13656):VPAKL (SEQ ID NO: 13607):SPIS (SEQ ID NO: 13574), KASKAXX (SEQ ID NO: 13654):VPAKL (SEQ ID NO: 13607):SPIS (SEQ ID NO: 13574), GSAGPXX (SEQ ID NO: 13651):VPAKM (SEQ ID NO: 13608):SPIS (SEQ ID NO: 13574), STPPTXX (SEQ ID NO: 13662):VPARL (SEQ ID NO: 13611):SPIS (SEQ ID NO: 13574), HVPKPXX (SEQ ID NO: 13652):VPAKL (SEQ ID NO: 13607):SPIS (SEQ ID NO: 13574), RVPSTXX (SEQ ID NO: 13659):VPAKT (SEQ ID NO: 13609):SPIS (SEQ ID NO: 13574), ASAAPXX (SEQ ID NO: 13647):VPAAL (SEQ ID NO: 13604):SPIS (SEQ ID NO: 13574), ASASPXX (SEQ ID NO: 13648):VPADL (SEQ ID NO: 13605):SPIS (SEQ ID NO: 13574), KVGKAXX (SEQ ID NO: 13656):VPTKL (SEQ ID NO: 13633):SPIS (SEQ ID NO: 13574), NDEGLEX (SEQ ID NO: 13657):VPTEE (SEQ ID NO: 13630):SPIS (SEQ ID NO: 13574), NDEGLEX (SEQ ID NO: 13657):VPTGQ (SEQ ID NO: 13632):SPIS (SEQ ID NO: 13574), KIPKAXX (SEQ ID NO: 13655):APVEL (SEQ ID NO: 13586):KPLS (SEQ ID NO: 13566), GIPEPXX (SEQ ID NO: 13650):APVKM (SEQ ID NO: 13588):KPLS (SEQ ID NO: 13566), SIPKAXX (SEQ ID NO: 13660):APVEL (SEQ ID NO: 13586):KPLS (SEQ ID NO: 13566), HVTKPTX (SEQ ID NO: 13653):APVKL (SEQ ID NO: 13587):KPLS (SEQ ID NO: 13566), YVPKPXX (SEQ ID NO: 13664):APVKL (SEQ ID NO: 13587):KPLS (SEQ ID NO: 13566), TVPKPXX (SEQ ID NO: 13663):APVQL (SEQ ID NO: 13590):KPLS (SEQ ID NO: 13566), AVPKAXX (SEQ ID NO: 13649):APVKL (SEQ ID NO: 13587):KPLS (SEQ ID NO: 13566), KVGKAXX (SEQ ID NO: 13656):APVKL (SEQ ID NO: 13587):KPLS (SEQ ID NO: 13566), KASKAXX (SEQ ID NO: 13654):APVKL (SEQ ID NO: 13587):KPLS (SEQ ID NO: 13566), GSAGPXX (SEQ ID NO: 13651):APVKM (SEQ ID NO: 13588):KPLS (SEQ ID NO: 13566), AAPASXX (SEQ ID NO: 13646):APVRL (SEQ ID NO: 13591):KPLS (SEQ ID NO: 13566), STPPTXX (SEQ ID NO: 13662):APVRL (SEQ ID NO: 13591):KPLS (SEQ ID NO: 13566), HVPKPXX (SEQ ID NO: 13652):APVKL (SEQ ID NO: 13587):KPLS (SEQ ID NO: 13566), ASAAPXX (SEQ ID NO: 13647):APVAL (SEQ ID NO: 13584):KPLS (SEQ ID NO: 13566), ASASPXX (SEQ ID NO: 13648):APVDL (SEQ ID NO: 13585):KPLS (SEQ ID NO: 13566), KIPKAXX (SEQ ID NO: 13655):VPTEL (SEQ ID NO: 13631):KPLS (SEQ ID NO: 13566), GIPEPXX (SEQ ID NO: 13650):VPEKM (SEQ ID NO: 13616):KPLS (SEQ ID NO: 13566), SIPKAXX (SEQ ID NO: 13660):VPTEL (SEQ ID NO: 13631):KPLS (SEQ ID NO: 13566), HVTKPTX (SEQ ID NO: 13653):APTKL (SEQ ID NO: 13579):KPLS (SEQ ID NO: 13566), YVPKPXX (SEQ ID NO: 13664):APTKL (SEQ ID NO: 13579):KPLS (SEQ ID NO: 13566), TVPKPXX (SEQ ID NO: 13663):APTQL (SEQ ID NO: 13582):KPLS (SEQ ID NO: 13566), AVPKAXX (SEQ ID NO: 13649):APTKL (SEQ ID NO: 13579):KPLS (SEQ ID NO: 13566), KVGKAXX (SEQ ID NO: 13656):VPTKL (SEQ ID NO: 13633):KPLS (SEQ ID NO: 13566), KASKAXX (SEQ ID NO: 13654):VPTKL (SEQ ID NO: 13633):KPLS (SEQ ID NO: 13566), GSAGPXX (SEQ ID NO: 13651):TPTKM (SEQ ID NO: 13598):KPLS (SEQ ID NO: 13566), AAPASXX (SEQ ID NO: 13646):VPARL (SEQ ID NO: 13611):KPLS (SEQ ID NO: 13566), STPPTXX (SEQ ID NO: 13662):VPTRL (SEQ ID NO: 13637):KPLS (SEQ ID NO: 13566), HVPKPXX (SEQ ID NO: 13652):APTKL (SEQ ID NO: 13579):KPLS (SEQ ID NO: 13566), ASAAPXX (SEQ ID NO: 13647):VPQAL (SEQ ID NO: 13620):KPLS (SEQ ID NO: 13566), ASASPXX (SEQ ID NO: 13648):VSQDL (SEQ ID NO: 13639):KPLS (SEQ ID NO: 13566), ASASPXX (SEQ ID NO: 13648):VPQDL (SEQ ID NO: 13621):KPLS (SEQ ID NO: 13566), NDEGLEX (SEQ ID NO: 13657):VPTEE (SEQ ID NO: 13630):KPLS (SEQ ID NO: 13566), NDEGLEX (SEQ ID NO: 13657):VPTGQ (SEQ ID NO: 13632):KPLS (SEQ ID NO: 13566), SSVKXQP (SEQ ID NO: 13661):SRVHH (SEQ ID NO: 13592):KPLS (SEQ ID NO: 13566), RNVQXRP (SEQ ID NO: 13658):TQVQL (SEQ ID NO: 13603):KPLS (SEQ ID NO: 13566), KIPKAXX (SEQ ID NO: 13655):VPQEL (SEQ ID NO: 13622):EPLP (SEQ ID NO: 13564), GIPEPXX (SEQ ID NO: 13650):VPQKM (SEQ ID NO: 13624):EPLP (SEQ ID NO: 13564), SIPKAXX (SEQ ID NO: 13660):VPQEL (SEQ ID NO: 13622):EPLP (SEQ ID NO: 13564), HVTKPTX (SEQ ID NO: 13653):VPQKL (SEQ ID NO: 13623):EPLP (SEQ ID NO: 13564), YVPKPXX (SEQ ID NO: 13664):VPQKL (SEQ ID NO: 13623):EPLP (SEQ ID NO: 13564), TVPKPXX (SEQ ID NO: 13663):VPQQL (SEQ ID NO: 13626):EPLP (SEQ ID NO: 13564), AVPKAXX (SEQ ID NO: 13649):VPQKL (SEQ ID NO: 13623):EPLP (SEQ ID NO: 13564), KVGKAXX (SEQ ID NO: 13656):VPQKL (SEQ ID NO: 13623):EPLP (SEQ ID NO: 13564), KASKAXX (SEQ ID NO: 13654):VPQKL (SEQ ID NO: 13623):EPLP (SEQ ID NO: 13564), GSAGPXX (SEQ ID NO: 13651):VPQKM (SEQ ID NO: 13624):EPLP (SEQ ID NO: 13564), AAPASXX (SEQ ID NO: 13646):VPQRL (SEQ ID NO: 13627):EPLP (SEQ ID NO: 13564), STPPTXX (SEQ ID NO: 13662):VPQRL (SEQ ID NO: 13627):EPLP (SEQ ID NO: 13564), HVPKPXX (SEQ ID NO: 13652):VPQKL (SEQ ID NO: 13623):EPLP (SEQ ID NO: 13564), RVPSTXX (SEQ ID NO: 13659):VPQKT (SEQ ID NO: 13625):EPLP (SEQ ID NO: 13564), ASASPXX (SEQ ID NO: 13648):VPQDL (SEQ ID NO: 13621):EPLP (SEQ ID NO: 13564), KIPKAXX (SEQ ID NO: 13655):VPTEL (SEQ ID NO: 13631):EPLP (SEQ ID NO: 13564), GIPEPXX (SEQ ID NO: 13650):VPEKM (SEQ ID NO: 13616):EPLP (SEQ ID NO: 13564), SIPKAXX (SEQ ID NO: 13660):VPTEL (SEQ ID NO: 13631):EPLP (SEQ ID NO: 13564), HVTKPTX (SEQ ID NO: 13653):APTKL (SEQ ID NO: 13579):EPLP (SEQ ID NO: 13564), YVPKPXX (SEQ ID NO: 13664):APTKL (SEQ ID NO: 13579):EPLP (SEQ ID NO: 13564), TVPKPXX (SEQ ID NO: 13663):APTQL (SEQ ID NO: 13582):EPLP (SEQ ID NO: 13564), AVPKAXX (SEQ ID NO: 13649):APTKL (SEQ ID NO: 13579):EPLP (SEQ ID NO: 13564), KVGKAXX (SEQ ID NO: 13656):VPTKL (SEQ ID NO: 13633):EPLP (SEQ ID NO: 13564), KASKAXX (SEQ ID NO: 13654):VPTKL (SEQ ID NO: 13633):EPLP (SEQ ID NO: 13564), GSAGPXX (SEQ ID NO: 13651):TPTKM (SEQ ID NO: 13598):EPLP (SEQ ID NO: 13564), AAPASXX (SEQ ID NO: 13646):VPARL (SEQ ID NO: 13611):EPLP (SEQ ID NO: 13564), STPPTXX (SEQ ID NO: 13662):VPTRL (SEQ ID NO: 13637):EPLP (SEQ ID NO: 13564), HVPKPXX (SEQ ID NO: 13652):APTKL (SEQ ID NO: 13579):EPLP (SEQ ID NO: 13564), RVPSTXX (SEQ ID NO: 13659):APVKT (SEQ ID NO: 13589):EPLP (SEQ ID NO: 13564), ASASPXX (SEQ ID NO: 13648):VSQDL (SEQ ID NO: 13639):EPLP (SEQ ID NO: 13564), NDEGLEX (SEQ ID NO: 13657):VPTEE (SEQ ID NO: 13630):EPLP (SEQ ID NO: 13564), NDEGLEX (SEQ ID NO: 13657):VPTGQ (SEQ ID NO: 13632):EPLP (SEQ ID NO: 13564), SSVKXQP (SEQ ID NO: 13661):SRVHH (SEQ ID NO: 13592):EPLP (SEQ ID NO: 13564), RNVQXRP (SEQ ID NO: 13658):TQVQL (SEQ ID NO: 13603):EPLP (SEQ ID NO: 13564), KIPKAXX (SEQ ID NO: 13655):VSQEL (SEQ ID NO: 13640):EPLT (SEQ ID NO: 13565), GIPEPXX (SEQ ID NO: 13650):VSQKM (SEQ ID NO: 13642):EPLT (SEQ ID NO: 13565), SIPKAXX (SEQ ID NO: 13660):VSQEL (SEQ ID NO: 13640):EPLT (SEQ ID NO: 13565), HVTKPTX (SEQ ID NO: 13653):VSQKL (SEQ ID NO: 13641):EPLT (SEQ ID NO: 13565), YVPKPXX (SEQ ID NO: 13664):VSQKL (SEQ ID NO: 13641):EPLT (SEQ ID NO: 13565), TVPKPXX (SEQ ID NO: 13663):VSQQL (SEQ ID NO: 13644):EPLT (SEQ ID NO: 13565), AVPKAXX (SEQ ID NO: 13649):VSQKL (SEQ ID NO: 13641):EPLT (SEQ ID NO: 13565), KVGKAXX (SEQ ID NO: 13656):VSQKL (SEQ ID NO: 13641):EPLT (SEQ ID NO: 13565), KASKAXX (SEQ ID NO: 13654):VSQKL (SEQ ID NO: 13641):EPLT (SEQ ID NO: 13565), GSAGPXX (SEQ ID NO: 13651):VSQKM (SEQ ID NO: 13642):EPLT (SEQ ID NO: 13565), AAPASXX (SEQ ID NO: 13646):VSQRL (SEQ ID NO: 13645):EPLT (SEQ ID NO: 13565), STPPTXX (SEQ ID NO: 13662):VSQRL (SEQ ID NO: 13645):EPLT (SEQ ID NO: 13565), HVPKPXX (SEQ ID NO: 13652):VSQKL (SEQ ID NO: 13641):EPLT (SEQ ID NO: 13565), RVPSTXX (SEQ ID NO: 13659):VSQKT (SEQ ID NO: 13643):EPLT (SEQ ID NO: 13565), ASAAPXX (SEQ ID NO: 13647):VSQAL (SEQ ID NO: 13638):EPLT (SEQ ID NO: 13565), ASASPXX (SEQ ID NO: 13648):VSQDL (SEQ ID NO: 13639):EPLT (SEQ ID NO: 13565), KIPKAXX (SEQ ID NO: 13655):VPTEL (SEQ ID NO: 13631):EPLT (SEQ ID NO: 13565), GIPEPXX (SEQ ID NO: 13650):VPEKM (SEQ ID NO: 13616):EPLT (SEQ ID NO: 13565), SIPKAXX (SEQ ID NO: 13660):VPTEL (SEQ ID NO: 13631):EPLT (SEQ ID NO: 13565), HVTKPTX (SEQ ID NO: 13653):APTKL (SEQ ID NO: 13579):EPLT (SEQ ID NO: 13565), YVPKPXX (SEQ ID NO: 13664):APTKL (SEQ ID NO: 13579):EPLT (SEQ ID NO: 13565), TVPKPXX (SEQ ID NO: 13663):APTQL (SEQ ID NO: 13582):EPLT (SEQ ID NO: 13565), AVPKAXX (SEQ ID NO: 13649):APTKL (SEQ ID NO: 13579):EPLT (SEQ ID NO: 13565), KVGKAXX (SEQ ID NO: 13656):VPTKL (SEQ ID NO: 13633):EPLT (SEQ ID NO: 13565), KASKAXX (SEQ ID NO: 13654):VPTKL (SEQ ID NO: 13633):EPLT (SEQ ID NO: 13565), GSAGPXX (SEQ ID NO: 13651):TPTKM (SEQ ID NO: 13598):EPLT (SEQ ID NO: 13565), AAPASXX (SEQ ID NO: 13646):VPARL (SEQ ID NO: 13611):EPLT (SEQ ID NO: 13565), STPPTXX (SEQ ID NO: 13662):VPTRL (SEQ ID NO: 13637):EPLT (SEQ ID NO: 13565), HVPKPXX (SEQ ID NO: 13652):APTKL (SEQ ID NO: 13579):EPLT (SEQ ID NO: 13565), RVPSTXX (SEQ ID NO: 13659):APVKT (SEQ ID NO: 13589):EPLT (SEQ ID NO: 13565), ASAAPXX (SEQ ID NO: 13647):VPQAL (SEQ ID NO: 13620):EPLT (SEQ ID NO: 13565), NDEGLEX (SEQ ID NO: 13657):VPTEE (SEQ ID NO: 13630):EPLT (SEQ ID NO: 13565), NDEGLEX (SEQ ID NO: 13657):VPTGQ (SEQ ID NO: 13632):EPLT (SEQ ID NO: 13565), SSVKXQP (SEQ ID NO: 13661):SRVHH (SEQ ID NO: 13592):EPLT (SEQ ID NO: 13565), RNVQXRP (SEQ ID NO: 13658):TQVQL (SEQ ID NO: 13603):EPLT (SEQ ID NO: 13565), KIPKAXX (SEQ ID NO: 13655):VPQEL (SEQ ID NO: 13622):EPLT (SEQ ID NO: 13565), GIPEPXX (SEQ ID NO: 13650):VPQKM (SEQ ID NO: 13624):EPLT (SEQ ID NO: 13565), SIPKAXX (SEQ ID NO: 13660):VPQEL (SEQ ID NO: 13622):EPLT (SEQ ID NO: 13565), HVTKPTX (SEQ ID NO: 13653):VPQKL (SEQ ID NO: 13623):EPLT (SEQ ID NO: 13565), YVPKPXX (SEQ ID NO: 13664):VPQKL (SEQ ID NO: 13623):EPLT (SEQ ID NO: 13565), TVPKPXX (SEQ ID NO: 13663):VPQQL (SEQ ID NO: 13626):EPLT (SEQ ID NO: 13565), AVPKAXX (SEQ ID NO: 13649):VPQKL (SEQ ID NO: 13623):EPLT (SEQ ID NO: 13565), KVGKAXX (SEQ ID NO: 13656):VPQKL (SEQ ID NO: 13623):EPLT (SEQ ID NO: 13565), KASKAXX (SEQ ID NO: 13654):VPQKL (SEQ ID NO: 13623):EPLT (SEQ ID NO: 13565), GSAGPXX (SEQ ID NO: 13651):VPQKM (SEQ ID NO: 13624):EPLT (SEQ ID NO: 13565), AAPASXX (SEQ ID NO: 13646):VPQRL (SEQ ID NO: 13627):EPLT (SEQ ID NO: 13565), STPPTXX (SEQ ID NO: 13662):VPQRL (SEQ ID NO: 13627):EPLT (SEQ ID NO: 13565), HVPKPXX (SEQ ID NO: 13652):VPQKL (SEQ ID NO: 13623):EPLT (SEQ ID NO: 13565), RVPSTXX (SEQ ID NO: 13659):VPQKT (SEQ ID NO: 13625):EPLT (SEQ ID NO: 13565), ASASPXX (SEQ ID NO: 13648):VPQDL (SEQ ID NO: 13621):EPLT (SEQ ID NO: 13565), NDEGLEX (SEQ ID NO: 13657):VPTGQ (SEQ ID NO: 13632):SNIT (SEQ ID NO: 13572), GIPEPXX (SEQ ID NO: 13650):VPEKM (SEQ ID NO: 13616):SNIT (SEQ ID NO: 13572), HVTKPTX (SEQ ID NO: 13653):APTKL (SEQ ID NO: 13579):SNIT (SEQ ID NO: 13572), YVPKPXX (SEQ ID NO: 13664):APTKL (SEQ ID NO: 13579):SNIT (SEQ ID NO: 13572), TVPKPXX (SEQ ID NO: 13663):APTQL (SEQ ID NO: 13582):SNIT (SEQ ID NO: 13572), AVPKAXX (SEQ ID NO: 13649):APTKL (SEQ ID NO: 13579):SNIT (SEQ ID NO: 13572), GSAGPXX (SEQ ID NO: 13651):TPTKM (SEQ ID NO: 13598):SNIT (SEQ ID NO: 13572), AAPASXX (SEQ ID NO: 13646):VPARL (SEQ ID NO: 13611):SNIT (SEQ ID NO: 13572), HVPKPXX (SEQ ID NO: 13652):APTKL (SEQ ID NO: 13579):SNIT (SEQ ID NO: 13572), RVPSTXX (SEQ ID NO: 13659):APVKT (SEQ ID NO: 13589):SNIT (SEQ ID NO: 13572), ASAAPXX (SEQ ID NO: 13647):VPQAL (SEQ ID NO: 13620):SNIT (SEQ ID NO: 13572), ASASPXX (SEQ ID NO: 13648):VSQDL (SEQ ID NO: 13639):SNIT (SEQ ID NO: 13572), ASASPXX (SEQ ID NO: 13648):VPQDL (SEQ ID NO: 13621):SNIT (SEQ ID NO: 13572), SSVKXQP (SEQ ID NO: 13661):SRVHH (SEQ ID NO: 13592):SNIT (SEQ ID NO: 13572), RNVQXRP (SEQ ID NO: 13658):TQVQL (SEQ ID NO: 13603):SNIT (SEQ ID NO: 13572), RNVQXRP (SEQ ID NO: 13658):SRVQL (SEQ ID NO: 13593):RSVK (SEQ ID NO: 13569), KIPKAXX (SEQ ID NO: 13655):VPTEL (SEQ ID NO: 13631):RSVK (SEQ ID NO: 13569), GIPEPXX (SEQ ID NO: 13650):VPEKM (SEQ ID NO: 13616):RSVK (SEQ ID NO: 13569), SIPKAXX (SEQ ID NO: 13660):VPTEL (SEQ ID NO: 13631):RSVK (SEQ ID NO: 13569), HVTKPTX (SEQ ID NO: 13653):APTKL (SEQ ID NO: 13579):RSVK (SEQ ID NO: 13569), YVPKPXX (SEQ ID NO: 13664):APTKL (SEQ ID NO: 13579):RSVK (SEQ ID NO: 13569), TVPKPXX (SEQ ID NO: 13663):APTQL (SEQ ID NO: 13582):RSVK (SEQ ID NO: 13569), AVPKAXX (SEQ ID NO: 13649):APTKL (SEQ ID NO: 13579):RSVK (SEQ ID NO: 13569), KVGKAXX (SEQ ID NO: 13656):VPTKL (SEQ ID NO: 13633):RSVK (SEQ ID NO: 13569), KASKAXX (SEQ ID NO: 13654):VPTKL (SEQ ID NO: 13633):RSVK (SEQ ID NO: 13569), GSAGPXX (SEQ ID NO: 13651):TPTKM (SEQ ID NO: 13598):RSVK (SEQ ID NO: 13569), AAPASXX (SEQ ID NO: 13646):VPARL (SEQ ID NO: 13611):RSVK (SEQ ID NO: 13569), STPPTXX (SEQ ID NO: 13662):VPTRL (SEQ ID NO: 13637):RSVK (SEQ ID NO: 13569), HVPKPXX (SEQ ID NO: 13652):APTKL (SEQ ID NO: 13579):RSVK (SEQ ID NO: 13569), RVPSTXX (SEQ ID NO: 13659):APVKT (SEQ ID NO: 13589):RSVK (SEQ ID NO: 13569), ASAAPXX (SEQ ID NO: 13647):VPQAL (SEQ ID NO: 13620):RSVK (SEQ ID NO: 13569), ASASPXX (SEQ ID NO: 13648):VSQDL (SEQ ID NO: 13639):RSVK (SEQ ID NO: 13569), ASASPXX (SEQ ID NO: 13648):VPQDL (SEQ ID NO: 13621):RSVK (SEQ ID NO: 13569), NDEGLEX (SEQ ID NO: 13657):VPTEE (SEQ ID NO: 13630):RSVK (SEQ ID NO: 13569), NDEGLEX (SEQ ID NO: 13657):VPTGQ (SEQ ID NO: 13632):RSVK (SEQ ID NO: 13569), RNVQXRP (SEQ ID NO: 13658):TQVQL (SEQ ID NO: 13603):RSVK (SEQ ID NO: 13569), SSVKXQP (SEQ ID NO: 13661):TQVHH (SEQ ID NO: 13602):RPVQ (SEQ ID NO: 13568), KIPKAXX (SEQ ID NO: 13655):VPTEL (SEQ ID NO: 13631):RPVQ (SEQ ID NO: 13568), GIPEPXX (SEQ ID NO: 13650):VPEKM (SEQ ID NO: 13616):RPVQ (SEQ ID NO: 13568), SIPKAXX (SEQ ID NO: 13660):VPTEL (SEQ ID NO: 13631):RPVQ (SEQ ID NO: 13568), HVTKPTX (SEQ ID NO: 13653):APTKL (SEQ ID NO: 13579):RPVQ (SEQ ID NO: 13568), YVPKPXX (SEQ ID NO: 13664):APTKL (SEQ ID NO: 13579):RPVQ (SEQ ID NO: 13568), TVPKPXX (SEQ ID NO: 13663):APTQL (SEQ ID NO: 13582):RPVQ (SEQ ID NO: 13568), AVPKAXX (SEQ ID NO: 13649):APTKL (SEQ ID NO: 13579):RPVQ (SEQ ID NO: 13568), KVGKAXX (SEQ ID NO: 13656):VPTKL (SEQ ID NO: 13633):RPVQ (SEQ ID NO: 13568), KASKAXX (SEQ ID NO: 13654):VPTKL (SEQ ID NO: 13633):RPVQ (SEQ ID NO: 13568), GSAGPXX (SEQ ID NO: 13651):TPTKM (SEQ ID NO: 13598):RPVQ (SEQ ID NO: 13568), AAPASXX (SEQ ID NO: 13646):VPARL (SEQ ID NO: 13611):RPVQ (SEQ ID NO: 13568), STPPTXX (SEQ ID NO: 13662):VPTRL (SEQ ID NO: 13637):RPVQ (SEQ ID NO: 13568), HVPKPXX (SEQ ID NO: 13652):APTKL (SEQ ID NO: 13579):RPVQ (SEQ ID NO: 13568), RVPSTXX (SEQ ID NO: 13659):APVKT (SEQ ID NO: 13589):RPVQ (SEQ ID NO: 13568), ASAAPXX (SEQ ID NO: 13647):VPQAL (SEQ ID NO: 13620):RPVQ (SEQ ID NO: 13568), ASASPXX (SEQ ID NO: 13648):VSQDL (SEQ ID NO: 13639):RPVQ (SEQ ID NO: 13568), ASASPXX (SEQ ID NO: 13648):VPQDL (SEQ ID NO: 13621):RPVQ (SEQ ID NO: 13568), NDEGLEX (SEQ ID NO: 13657):VPTEE (SEQ ID NO: 13630):RPVQ (SEQ ID NO: 13568), NDEGLEX (SEQ ID NO: 13657):VPTGQ (SEQ ID NO: 13632):RPVQ (SEQ ID NO: 13568) and SSVKXQP (SEQ ID NO: 13661):SRVHH (SEQ ID NO: 13592):RPVQ (SEQ ID NO: 13568).

[0385] In certain embodiments, the triplet PEP7:PEP5:PEP12 is selected from the group consisting of GIPEPXX (SEQ ID NO: 13650):VPTKM (SEQ ID NO: 13634):SAIS-AA¹⁷-LYL (SEQ ID NO: 13808), HVTKPTX (SEQ ID NO: 13653):VPTKL (SEQ ID NO: 13633):SAIS-AA¹⁷-LYL (SEQ ID NO: 13808), YVPKPXX (SEQ ID NO: 13664):VPTKL (SEQ ID NO: 13633):SAIS-AA¹⁷-LYL (SEQ ID NO: 13808), TVPKPXX (SEQ ID NO: 13663):VPTQL (SEQ ID NO: 13636):SAIS-AA¹⁷-LYL (SEQ ID NO: 13808), AVPKAXX (SEQ ID NO: 13649):VPTKL (SEQ ID NO: 13633):SAIS-AA¹⁷-LYL (SEQ ID NO: 13808), KVGKAXX (SEQ ID NO: 13656):VPTKL (SEQ ID NO: 13633):SAIS-AA¹⁷-LYL (SEQ ID NO: 13808), KASKAXX (SEQ ID NO: 13654):VPTKL (SEQ ID NO: 13633):SAIS-AA¹⁷-LYL (SEQ ID NO: 13808), GSAGPXX (SEQ ID NO: 13651):VPTKM (SEQ ID NO: 13634):SAIS-AA¹⁷-LYL (SEQ ID NO: 13808), AAPASXX (SEQ ID NO: 13646):VPTRL (SEQ ID NO: 13637):SAIS-AA¹⁷-LYL (SEQ ID NO: 13808), STPPTXX (SEQ ID NO: 13662):VPTRL (SEQ ID NO: 13637):SAIS-AA¹⁷-LYL (SEQ ID NO: 13808), HVPKPXX (SEQ ID NO: 13652):VPTKL (SEQ ID NO: 13633):SAIS-AA¹⁷-LYL (SEQ ID NO: 13808), RVPSTXX (SEQ ID NO: 13659):VPTKT (SEQ ID NO: 13635):SAIS-AA¹⁷-LYL (SEQ ID NO: 13808), ASAAPXX (SEQ ID NO: 13647):VPTAL (SEQ ID NO: 13628):SAIS-AA¹⁷-LYL (SEQ ID NO: 13808), ASASPXX (SEQ ID NO: 13648):VPTDL (SEQ ID NO: 13629):SAIS-AA¹⁷-LYL (SEQ ID NO: 13808), GIPEPXX (SEQ ID NO: 13650):VPEKM (SEQ ID NO: 13616):SAIS-AA¹⁷-LYL (SEQ ID NO: 13808), HVTKPTX (SEQ ID NO: 13653):APTKL (SEQ ID NO: 13579):SAIS-AA¹⁷-LYL (SEQ ID NO: 13808), YVPKPXX (SEQ ID NO: 13664):APTKL (SEQ ID NO: 13579):SAIS-AA¹⁷-LYL (SEQ ID NO: 13808), TVPKPXX (SEQ ID NO: 13663):APTQL (SEQ ID NO: 13582):SAIS-AA¹⁷-LYL (SEQ ID NO: 13808), AVPKAXX (SEQ ID NO: 13649):APTKL (SEQ ID NO: 13579):SAIS-AA¹⁷-LYL (SEQ ID NO: 13808), GSAGPXX (SEQ ID NO: 13651):TPTKM (SEQ ID NO: 13598):SAIS-AA¹⁷-LYL (SEQ ID NO: 13808), AAPASXX (SEQ ID NO: 13646):VPARL (SEQ ID NO: 13611):SAIS-AA¹⁷-LYL (SEQ ID NO: 13808), HVPKPXX (SEQ ID NO: 13652):APTKL (SEQ ID NO: 13579):SAIS-AA¹⁷-LYL (SEQ ID NO: 13808), RVPSTXX (SEQ ID NO: 13659):APVKT (SEQ ID NO: 13589):SAIS-AA¹⁷-LYL (SEQ ID NO: 13808), ASAAPXX (SEQ ID NO: 13647):VPQAL (SEQ ID NO: 13620):SAIS-AA¹⁷-LYL (SEQ ID NO: 13808), ASASPXX (SEQ ID NO: 13648):VSQDL (SEQ ID NO: 13639):SAIS-AA¹⁷-LYL (SEQ ID NO: 13808), ASASPXX (SEQ ID NO: 13648):VPQDL (SEQ ID NO: 13621):SAIS-AA¹⁷-LYL (SEQ ID NO: 13808), SSVKXQP (SEQ ID NO: 13661):SRVHH (SEQ ID NO: 13592):SAIS-AA¹⁷-LYL (SEQ ID NO: 13808), RNVQXRP (SEQ ID NO: 13658):TQVQL (SEQ ID NO: 13603):SAIS-AA¹⁷-LYL (SEQ ID NO: 13808), KIPKAXX (SEQ ID NO: 13655):VPEEL (SEQ ID NO: 13614):SSLS-AA¹⁷-LFF (SEQ ID NO: 13815), SIPKAXX (SEQ ID NO: 13660):VPEEL (SEQ ID NO: 13614):SSLS-AA¹⁷-LFF (SEQ ID NO: 13815), HVTKPTX (SEQ ID NO: 13653):VPEKL (SEQ ID NO: 13615):SSLS-AA¹⁷-LFF (SEQ ID NO: 13815), YVPKPXX (SEQ ID NO: 13664):VPEKL (SEQ ID NO: 13615):SSLS-AA¹⁷-LFF (SEQ ID NO: 13815), TVPKPXX (SEQ ID NO: 13663):VPEQL (SEQ ID NO: 13618):SSLS-AA¹⁷-LFF (SEQ ID NO: 13815), AVPKAXX (SEQ ID NO: 13649):VPEKL (SEQ ID NO: 13615):SSLS-AA¹⁷-LFF (SEQ ID NO: 13815), KVGKAXX (SEQ ID NO: 13656):VPEKL (SEQ ID NO: 13615):SSLS-AA¹⁷-LFF (SEQ ID NO: 13815), KASKAXX (SEQ ID NO: 13654):VPEKL (SEQ ID NO: 13615):SSLS-AA¹⁷-LFF (SEQ ID NO: 13815), GSAGPXX (SEQ ID NO: 13651):VPEKM (SEQ ID NO: 13616):SSLS-AA¹⁷-LFF (SEQ ID NO: 13815), AAPASXX (SEQ ID NO: 13646):VPERL (SEQ ID NO: 13619):SSLS-AA¹⁷-LFF (SEQ ID NO: 13815), STPPTXX (SEQ ID NO: 13662):VPERL (SEQ ID NO: 13619):SSLS-AA¹⁷-LFF (SEQ ID NO: 13815), HVPKPXX (SEQ ID NO: 13652):VPEKL (SEQ ID NO: 13615):SSLS-AA¹⁷-LFF (SEQ ID NO: 13815), RVPSTXX (SEQ ID NO: 13659):VPEKT (SEQ ID NO: 13617):SSLS-AA¹⁷-LFF (SEQ ID NO: 13815), ASAAPXX (SEQ ID NO: 13647):VPEAL (SEQ ID NO: 13612):SSLS-AA¹⁷-LFF (SEQ ID NO: 13815), ASASPXX (SEQ ID NO: 13648):VPEDL (SEQ ID NO: 13613):SSLS-AA¹⁷-LFF (SEQ ID NO: 13815), KIPKAXX (SEQ ID NO: 13655):VPTEL (SEQ ID NO: 13631):SSLS-AA¹⁷-LFF (SEQ ID NO: 13815), SIPKAXX (SEQ ID NO: 13660):VPTEL (SEQ ID NO: 13631):SSLS-AA¹⁷-LFF (SEQ ID NO: 13815), HVTKPTX (SEQ ID NO: 13653):APTKL (SEQ ID NO: 13579):SSLS-AA¹⁷-LFF (SEQ ID NO: 13815), YVPKPXX (SEQ ID NO: 13664):APTKL (SEQ ID NO: 13579):SSLS-AA¹⁷-LFF (SEQ ID NO: 13815), TVPKPXX (SEQ ID NO: 13663):APTQL (SEQ ID NO: 13582):SSLS-AA¹⁷-LFF (SEQ ID NO: 13815), AVPKAXX (SEQ ID NO: 13649):APTKL (SEQ ID NO: 13579):SSLS-AA¹⁷-LFF (SEQ ID NO: 13815), KVGKAXX (SEQ ID NO: 13656):VPTKL (SEQ ID NO: 13633):SSLS-AA¹⁷-LFF (SEQ ID NO: 13815), KASKAXX (SEQ ID NO: 13654):VPTKL (SEQ ID NO: 13633):SSLS-AA¹⁷-LFF (SEQ ID NO: 13815), GSAGPXX (SEQ ID NO: 13651):TPTKM (SEQ ID NO: 13598):SSLS-AA¹⁷-LFF (SEQ ID NO: 13815), AAPASXX (SEQ ID NO: 13646):VPARL (SEQ ID NO: 13611):SSLS-AA¹⁷-LFF (SEQ ID NO: 13815), STPPTXX (SEQ ID NO: 13662):VPTRL (SEQ ID NO: 13637):SSLS-AA¹⁷-LFF (SEQ ID NO: 13815), HVPKPXX (SEQ ID NO: 13652):APTKL (SEQ ID NO: 13579):SSLS-AA¹⁷-LFF (SEQ ID NO: 13815), RVPSTXX (SEQ ID NO: 13659):APVKT (SEQ ID NO: 13589):SSLS-AA¹⁷-LFF (SEQ ID NO: 13815), ASAAPXX (SEQ ID NO: 13647):VPQAL (SEQ ID NO: 13620):SSLS-AA¹⁷-LFF (SEQ ID NO: 13815), ASASPXX (SEQ ID NO: 13648):VSQDL (SEQ ID NO: 13639):SSLS-AA¹⁷-LFF (SEQ ID NO: 13815), ASASPXX (SEQ ID NO: 13648):VPQDL (SEQ ID NO: 13621):SSLS-AA¹⁷-LFF (SEQ ID NO: 13815), NDEGLEX (SEQ ID NO: 13657):VPTEE (SEQ ID NO: 13630):SSLS-AA¹⁷-LFF (SEQ ID NO: 13815), NDEGLEX (SEQ ID NO: 13657):VPTGQ (SEQ ID NO: 13632):SSLS-AA¹⁷-LFF (SEQ ID NO: 13815), SSVKXQP (SEQ ID NO: 13661):SRVHH (SEQ ID NO: 13592):SSLS-AA¹⁷-LFF (SEQ ID NO: 13815), RNVQXRP (SEQ ID NO: 13658):TQVQL (SEQ ID NO: 13603):SSLS-AA¹⁷-LFF (SEQ ID NO: 13815), KIPKAXX (SEQ ID NO: 13655):APTEL (SEQ ID NO: 13578):NAIS-AA¹⁷-LYF (SEQ ID NO: 13805), GIPEPXX (SEQ ID NO: 13650):APTKM (SEQ ID NO: 13580):NAIS-AA¹⁷-LYF (SEQ ID NO: 13805), SIPKAXX (SEQ ID NO: 13660):APTEL (SEQ ID NO: 13578):NAIS-AA¹⁷-LYF (SEQ ID NO: 13805), AVPKAXX (SEQ ID NO: 13649):APTKL (SEQ ID NO: 13579):NAIS-AA¹⁷-LYF (SEQ ID NO: 13805), KVGKAXX (SEQ ID NO: 13656):APTKL (SEQ ID NO: 13579):NAIS-AA¹⁷-LYF (SEQ ID NO: 13805), KASKAXX (SEQ ID NO: 13654):APTKL (SEQ ID NO: 13579):NAIS-AA¹⁷-LYF (SEQ ID NO: 13805), GSAGPXX (SEQ ID NO: 13651):APTKM (SEQ ID NO: 13580):NAIS-AA¹⁷-LYF (SEQ ID NO: 13805), AAPASXX (SEQ ID NO: 13646):APTRL (SEQ ID NO: 13583):NAIS-AA¹⁷-LYF (SEQ ID NO: 13805), STPPTXX (SEQ ID NO: 13662):APTRL (SEQ ID NO: 13583):NAIS-AA¹⁷-LYF (SEQ ID NO: 13805), RVPSTXX (SEQ ID NO: 13659):APTKT (SEQ ID NO: 13581):NAIS-AA¹⁷-LYF (SEQ ID NO: 13805), ASAAPXX (SEQ ID NO: 13647):APTAL (SEQ ID NO: 13576):NAIS-AA¹⁷-LYF (SEQ ID NO: 13805), ASASPXX (SEQ ID NO: 13648):APTDL (SEQ ID NO: 13577):NAIS-AA¹⁷-LYF (SEQ ID NO: 13805), KIPKAXX (SEQ ID NO: 13655):VPTEL (SEQ ID NO: 13631):NAIS-AA¹⁷-LYF (SEQ ID NO: 13805), GIPEPXX (SEQ ID NO: 13650):VPEKM (SEQ ID NO: 13616):NAIS-AA¹⁷-LYF (SEQ ID NO: 13805), SIPKAXX (SEQ ID NO: 13660):VPTEL (SEQ ID NO: 13631):NAIS-AA¹⁷-LYF (SEQ ID NO: 13805), KVGKAXX (SEQ ID NO: 13656):VPTKL (SEQ ID NO: 13633):NAIS-AA¹⁷-LYF (SEQ ID NO: 13805), KASKAXX (SEQ ID NO: 13654):VPTKL (SEQ ID NO: 13633):NAIS-AA¹⁷-LYF (SEQ ID NO: 13805), GSAGPXX (SEQ ID NO: 13651):TPTKM (SEQ ID NO: 13598):NAIS-AA¹⁷-LYF (SEQ ID NO: 13805), AAPASXX (SEQ ID NO: 13646):VPARL (SEQ ID NO: 13611):NAIS-AA¹⁷-LYF (SEQ ID NO: 13805), STPPTXX (SEQ ID NO: 13662):VPTRL (SEQ ID NO: 13637):NAIS-AA¹⁷-LYF (SEQ ID NO: 13805), RVPSTXX (SEQ ID NO: 13659):APVKT (SEQ ID NO: 13589):NAIS-AA¹⁷-LYF (SEQ ID NO: 13805), ASAAPXX (SEQ ID NO: 13647):VPQAL (SEQ ID NO: 13620):NAIS-AA¹⁷-LYF (SEQ ID NO: 13805), ASASPXX (SEQ ID NO: 13648):VSQDL (SEQ ID NO: 13639):NAIS-AA¹⁷-LYF (SEQ ID NO: 13805), ASASPXX (SEQ ID NO: 13648):VPQDL (SEQ ID NO: 13621):NAIS-AA¹⁷-LYF (SEQ ID NO: 13805), NDEGLEX (SEQ ID NO: 13657):VPTEE (SEQ ID NO: 13630):NAIS-AA¹⁷-LYF (SEQ ID NO: 13805), NDEGLEX (SEQ ID NO: 13657):VPTGQ (SEQ ID NO: 13632):NAIS-AA¹⁷-LYF (SEQ ID NO: 13805), SSVKXQP (SEQ ID NO: 13661):SRVHH (SEQ ID NO: 13592):NAIS-AA¹⁷-LYF (SEQ ID NO: 13805), RNVQXRP (SEQ ID NO: 13658):TQVQL (SEQ ID NO: 13603):NAIS-AA¹⁷-LYF (SEQ ID NO: 13805), KIPKAXX (SEQ ID NO: 13655):APTEL (SEQ ID NO: 13578):SATS-AA¹⁷-LYY (SEQ ID NO: 13809), GIPEPXX (SEQ ID NO: 13650):APTKM (SEQ ID NO: 13580):SATS-AA¹⁷-LYY (SEQ ID NO: 13809), SIPKAXX (SEQ ID NO: 13660):APTEL (SEQ ID NO: 13578):SATS-AA¹⁷-LYY (SEQ ID NO: 13809), HVTKPTX (SEQ ID NO: 13653):APTKL (SEQ ID NO: 13579):SATS-AA¹⁷-LYY (SEQ ID NO: 13809), YVPKPXX (SEQ ID NO: 13664):APTKL (SEQ ID NO: 13579):SATS-AA¹⁷-LYY (SEQ ID NO: 13809), TVPKPXX (SEQ ID NO: 13663):APTQL (SEQ ID NO: 13582):SATS-AA¹⁷-LYY (SEQ ID NO: 13809), KVGKAXX (SEQ ID NO: 13656):APTKL (SEQ ID NO: 13579):SATS-AA¹⁷-LYY (SEQ ID NO: 13809), KASKAXX (SEQ ID NO: 13654):APTKL (SEQ ID NO: 13579):SATS-AA¹⁷-LYY (SEQ ID NO: 13809), GSAGPXX (SEQ ID NO: 13651):APTKM (SEQ ID NO: 13580):SATS-AA¹⁷-LYY (SEQ ID NO: 13809), AAPASXX (SEQ ID NO: 13646):APTRL (SEQ ID NO: 13583):SATS-AA¹⁷-LYY (SEQ ID NO: 13809), STPPTXX (SEQ ID NO: 13662):APTRL (SEQ ID NO: 13583):SATS-AA¹⁷-LYY (SEQ ID NO: 13809), HVPKPXX (SEQ ID NO: 13652):APTKL (SEQ ID NO: 13579):SATS-AA¹⁷-LYY (SEQ ID NO: 13809), RVPSTXX (SEQ ID NO: 13659):APTKT (SEQ ID NO: 13581):SATS-AA¹⁷-LYY (SEQ ID NO: 13809), ASAAPXX (SEQ ID NO: 13647):APTAL (SEQ ID NO: 13576):SATS-AA¹⁷-LYY (SEQ ID NO: 13809), ASASPXX (SEQ ID NO: 13648):APTDL (SEQ ID NO: 13577):SATS-AA¹⁷-LYY (SEQ ID NO: 13809), KIPKAXX (SEQ ID NO: 13655):VPTEL (SEQ ID NO: 13631):SATS-AA¹⁷-LYY (SEQ ID NO: 13809), GIPEPXX (SEQ ID NO: 13650):VPEKM (SEQ ID NO: 13616):SATS-AA¹⁷-LYY (SEQ ID NO: 13809), SIPKAXX (SEQ ID NO: 13660):VPTEL (SEQ ID NO: 13631):SATS-AA¹⁷-LYY (SEQ ID NO: 13809), KVGKAXX (SEQ ID NO: 13656):VPTKL (SEQ ID NO: 13633):SATS-AA¹⁷-LYY (SEQ ID NO: 13809), KASKAXX (SEQ ID NO: 13654):VPTKL (SEQ ID NO: 13633):SATS-AA¹⁷-LYY (SEQ ID NO: 13809), GSAGPXX (SEQ ID NO: 13651):TPTKM (SEQ ID NO: 13598):SATS-AA¹⁷-LYY (SEQ ID NO: 13809), AAPASXX (SEQ ID NO: 13646):VPARL (SEQ ID NO: 13611):SATS-AA¹⁷-LYY (SEQ ID NO: 13809), STPPTXX (SEQ ID NO: 13662):VPTRL (SEQ ID NO: 13637):SATS-AA¹⁷-LYY (SEQ ID NO: 13809), RVPSTXX (SEQ ID NO: 13659):APVKT (SEQ ID NO: 13589):SATS-AA¹⁷-LYY (SEQ ID NO: 13809), ASAAPXX (SEQ ID NO: 13647):VPQAL (SEQ ID NO: 13620):SATS-AA¹⁷-LYY (SEQ ID NO: 13809), ASASPXX (SEQ ID NO: 13648):VSQDL (SEQ ID NO: 13639):SATS-AA¹⁷-LYY (SEQ ID NO: 13809), ASASPXX (SEQ ID NO: 13648):VPQDL (SEQ ID NO: 13621):SATS-AA¹⁷-LYY (SEQ ID NO: 13809), NDEGLEX (SEQ ID NO: 13657):VPTEE (SEQ ID NO: 13630):SATS-AA¹⁷-LYY (SEQ ID NO: 13809), NDEGLEX (SEQ ID NO: 13657):VPTGQ (SEQ ID NO: 13632):SATS-AA¹⁷-LYY (SEQ ID NO: 13809), SSVKXQP (SEQ ID NO: 13661):SRVHH (SEQ ID NO: 13592):SATS-AA¹⁷-LYY (SEQ ID NO: 13809), RNVQXRP (SEQ ID NO: 13658):TQVQL (SEQ ID NO: 13603):SATS-AA¹⁷-LYY (SEQ ID NO: 13809), KIPKAXX (SEQ ID NO: 13655):VPTEL (SEQ ID NO: 13631):SPIS-AA¹⁷-LYK (SEQ ID NO: 13814), GIPEPXX (SEQ ID NO: 13650):VPTKM (SEQ ID NO: 13634):SPIS-AA¹⁷-LYK (SEQ ID NO: 13814), SIPKAXX (SEQ ID NO: 13660):VPTEL (SEQ ID NO: 13631):SPIS-AA¹⁷-LYK (SEQ ID NO: 13814), HVTKPTX (SEQ ID NO: 13653):VPTKL (SEQ ID NO: 13633):SPIS-AA¹⁷-LYK (SEQ ID NO: 13814), YVPKPXX (SEQ ID NO: 13664):VPTKL (SEQ ID NO: 13633):SPIS-AA¹⁷-LYK (SEQ ID NO: 13814), TVPKPXX (SEQ ID NO: 13663):VPTQL (SEQ ID NO: 13636):SPIS-AA¹⁷-LYK (SEQ ID NO: 13814), AVPKAXX (SEQ ID NO: 13649):VPTKL (SEQ ID NO: 13633):SPIS-AA¹⁷-LYK (SEQ ID NO: 13814), KASKAXX (SEQ ID NO: 13654):VPTKL (SEQ ID NO: 13633):SPIS-AA¹⁷-LYK (SEQ ID NO: 13814), GSAGPXX (SEQ ID NO: 13651):VPTKM (SEQ ID NO: 13634):SPIS-AA¹⁷-LYK (SEQ ID NO: 13814), AAPASXX (SEQ ID NO: 13646):VPTRL (SEQ ID NO: 13637):SPIS-AA¹⁷-LYK (SEQ ID NO: 13814), STPPTXX (SEQ ID NO: 13662):VPTRL (SEQ ID NO: 13637):SPIS-AA¹⁷-LYK (SEQ ID NO: 13814), HVPKPXX (SEQ ID NO: 13652):VPTKL (SEQ ID NO: 13633):SPIS-AA¹⁷-LYK (SEQ ID NO: 13814), RVPSTXX (SEQ ID NO: 13659):VPTKT (SEQ ID NO: 13635):SPIS-AA¹⁷-LYK (SEQ ID NO: 13814), ASAAPXX (SEQ ID NO: 13647):VPTAL (SEQ ID NO: 13628):SPIS-AA¹⁷-LYK (SEQ ID NO: 13814), ASASPXX (SEQ ID NO: 13648):VPTDL (SEQ ID NO: 13629):SPIS-AA¹⁷-LYK (SEQ ID NO: 13814), GIPEPXX (SEQ ID NO: 13650):VPEKM (SEQ ID NO: 13616):SPIS-AA¹⁷-LYK (SEQ ID NO: 13814), HVTKPTX (SEQ ID NO: 13653):APTKL (SEQ ID NO: 13579):SPIS-AA¹⁷-LYK (SEQ ID NO: 13814), YVPKPXX (SEQ ID NO: 13664):APTKL (SEQ ID NO: 13579):SPIS-AA¹⁷-LYK (SEQ ID NO: 13814), TVPKPXX (SEQ ID NO: 13663):APTQL (SEQ ID NO: 13582):SPIS-AA¹⁷-LYK (SEQ ID NO: 13814), AVPKAXX (SEQ ID NO: 13649):APTKL (SEQ ID NO: 13579):SPIS-AA¹⁷-LYK (SEQ ID NO: 13814), GSAGPXX (SEQ ID NO: 13651):TPTKM (SEQ ID NO: 13598):SPIS-AA¹⁷-LYK (SEQ ID NO: 13814), AAPASXX (SEQ ID NO: 13646):VPARL (SEQ ID NO: 13611):SPIS-AA¹⁷-LYK (SEQ ID NO: 13814), HVPKPXX (SEQ ID NO: 13652):APTKL (SEQ ID NO: 13579):SPIS-AA¹⁷-LYK (SEQ ID NO: 13814), RVPSTXX (SEQ ID NO: 13659):APVKT (SEQ ID NO: 13589):SPIS-AA¹⁷-LYK (SEQ ID NO: 13814), ASAAPXX (SEQ ID NO: 13647):VPQAL (SEQ ID NO: 13620):SPIS-AA¹⁷-LYK (SEQ ID NO: 13814), ASASPXX (SEQ ID NO: 13648):VSQDL (SEQ ID NO: 13639):SPIS-AA¹⁷-LYK (SEQ ID NO: 13814), ASASPXX (SEQ ID NO: 13648):VPQDL (SEQ ID NO: 13621):SPIS-AA¹⁷-LYK (SEQ ID NO: 13814), SSVKXQP (SEQ ID NO: 13661):SRVHH (SEQ ID NO: 13592):SPIS-AA¹⁷-LYK (SEQ ID NO: 13814), RNVQXRP (SEQ ID NO: 13658):TQVQL (SEQ ID NO: 13603):SPIS-AA¹⁷-LYK (SEQ ID NO: 13814), KIPKAXX (SEQ ID NO: 13655):VPTEL (SEQ ID NO: 13631):EPIS-AA¹⁷-LYL (SEQ ID NO: 13801), GIPEPXX (SEQ ID NO: 13650):VPTKM (SEQ ID NO: 13634):EPIS-AA¹⁷-LYL (SEQ ID NO: 13801), SIPKAXX (SEQ ID NO: 13660):VPTEL (SEQ ID NO: 13631):EPIS-AA¹⁷-LYL (SEQ ID NO: 13801), HVTKPTX (SEQ ID NO: 13653):VPTKL (SEQ ID NO: 13633):EPIS-AA¹⁷-LYL (SEQ ID NO: 13801), YVPKPXX (SEQ ID NO: 13664):VPTKL (SEQ ID NO: 13633):EPIS-AA¹⁷-LYL (SEQ ID NO: 13801), TVPKPXX (SEQ ID NO: 13663):VPTQL (SEQ ID NO: 13636):EPIS-AA¹⁷-LYL (SEQ ID NO: 13801), AVPKAXX (SEQ ID NO: 13649):VPTKL (SEQ ID NO: 13633):EPIS-AA¹⁷-LYL (SEQ ID NO: 13801), KVGKAXX (SEQ ID NO: 13656):VPTKL (SEQ ID NO: 13633):EPIS-AA¹⁷-LYL (SEQ ID NO: 13801), GSAGPXX (SEQ ID NO: 13651):VPTKM (SEQ ID NO: 13634):EPIS-AA¹⁷-LYL (SEQ ID NO: 13801), AAPASXX (SEQ ID NO: 13646):VPTRL (SEQ ID NO: 13637):EPIS-AA¹⁷-LYL (SEQ ID NO: 13801), STPPTXX (SEQ ID NO: 13662):VPTRL (SEQ ID NO: 13637):EPIS-AA¹⁷-LYL (SEQ ID NO: 13801), HVPKPXX (SEQ ID NO: 13652):VPTKL (SEQ ID NO: 13633):EPIS-AA¹⁷-LYL (SEQ ID NO: 13801), RVPSTXX (SEQ ID NO: 13659):VPTKT (SEQ ID NO: 13635):EPIS-AA¹⁷-LYL (SEQ ID NO: 13801), ASAAPXX (SEQ ID NO: 13647):VPTAL (SEQ ID NO: 13628):EPIS-AA¹⁷-LYL (SEQ ID NO: 13801), ASASPXX (SEQ ID NO: 13648):VPTDL (SEQ ID NO: 13629):EPIS-AA¹⁷-LYL (SEQ ID NO: 13801), GIPEPXX (SEQ ID NO: 13650):VPEKM (SEQ ID NO: 13616):EPIS-AA¹⁷-LYL (SEQ ID NO: 13801), HVTKPTX (SEQ ID NO: 13653):APTKL (SEQ ID NO: 13579):EPIS-AA¹⁷-LYL (SEQ ID NO: 13801), YVPKPXX (SEQ ID NO: 13664):APTKL (SEQ ID NO: 13579):EPIS-AA¹⁷-LYL (SEQ ID NO: 13801), TVPKPXX (SEQ ID NO: 13663):APTQL (SEQ ID NO: 13582):EPIS-AA¹⁷-LYL (SEQ ID NO: 13801), AVPKAXX (SEQ ID NO: 13649):APTKL (SEQ ID NO: 13579):EPIS-AA¹⁷-LYL (SEQ ID NO: 13801), GSAGPXX (SEQ ID NO: 13651):TPTKM (SEQ ID NO: 13598):EPIS-AA¹⁷-LYL (SEQ ID NO: 13801), AAPASXX (SEQ ID NO: 13646):VPARL (SEQ ID NO: 13611):EPIS-AA¹⁷-LYL (SEQ ID NO: 13801), HVPKPXX (SEQ ID NO: 13652):APTKL (SEQ ID NO: 13579):EPIS-AA¹⁷-LYL (SEQ ID NO: 13801), RVPSTXX (SEQ ID NO: 13659):APVKT (SEQ ID NO: 13589):EPIS-AA¹⁷-LYL (SEQ ID NO: 13801), ASAAPXX (SEQ ID NO: 13647):VPQAL (SEQ ID NO: 13620):EPIS-AA¹⁷-LYL (SEQ ID NO: 13801), ASASPXX (SEQ ID NO: 13648):VSQDL (SEQ ID NO: 13639):EPIS-AA¹⁷-LYL (SEQ ID NO: 13801), ASASPXX (SEQ ID NO: 13648):VPQDL (SEQ ID NO: 13621):EPIS-AA¹⁷-LYL (SEQ ID NO: 13801), SSVKXQP (SEQ ID NO: 13661):SRVHH (SEQ ID NO: 13592):EPIS-AA¹⁷-LYL (SEQ ID NO: 13801), RNVQXRP (SEQ ID NO: 13658):TQVQL (SEQ ID NO: 13603):EPIS-AA¹⁷-LYL (SEQ ID NO: 13801), KIPKAXX (SEQ ID NO: 13655):TPTEL (SEQ ID NO: 13596):SPIN-AA¹⁷-LYF (SEQ ID NO: 13811), GIPEPXX (SEQ ID NO: 13650):TPTKM (SEQ ID NO: 13598):SPIN-AA¹⁷-LYF (SEQ ID NO: 13811), SIPKAXX (SEQ ID NO: 13660):TPTEL (SEQ ID NO: 13596):SPIN-AA¹⁷-LYF (SEQ ID NO: 13811), HVTKPTX (SEQ ID NO: 13653):TPTKL (SEQ ID NO: 13597):SPIN-AA¹⁷-LYF (SEQ ID NO: 13811), YVPKPXX (SEQ ID NO: 13664):TPTKL (SEQ ID NO: 13597):SPIN-AA¹⁷-LYF (SEQ ID NO: 13811), TVPKPXX (SEQ ID NO: 13663):TPTQL (SEQ ID NO: 13600):SPIN-AA¹⁷-LYF (SEQ ID NO: 13811), AVPKAXX (SEQ ID NO: 13649):TPTKL (SEQ ID NO: 13597):SPIN-AA¹⁷-LYF (SEQ ID NO: 13811), KVGKAXX (SEQ ID NO: 13656):TPTKL (SEQ ID NO: 13597):SPIN-AA¹⁷-LYF (SEQ ID NO: 13811), KASKAXX (SEQ ID NO: 13654):TPTKL (SEQ ID NO: 13597):SPIN-AA¹⁷-LYF (SEQ ID NO: 13811), AAPASXX (SEQ ID NO: 13646):TPTRL (SEQ ID NO: 13601):SPIN-AA¹⁷-LYF (SEQ ID NO: 13811), STPPTXX (SEQ ID NO: 13662):TPTRL (SEQ ID NO: 13601):SPIN-AA¹⁷-LYF (SEQ ID NO: 13811), HVPKPXX (SEQ ID NO: 13652):TPTKL (SEQ ID NO: 13597):SPIN-AA¹⁷-LYF (SEQ ID NO: 13811), RVPSTXX (SEQ ID NO: 13659):TPTKT (SEQ ID NO: 13599):SPIN-AA¹⁷-LYF (SEQ ID NO: 13811), ASAAPXX (SEQ ID NO: 13647):TPTAL (SEQ ID NO: 13594):SPIN-AA¹⁷-LYF (SEQ ID NO: 13811), ASASPXX (SEQ ID NO: 13648):TPTDL (SEQ ID NO: 13595):SPIN-AA¹⁷-LYF (SEQ ID NO: 13811), KIPKAXX (SEQ ID NO: 13655):VPTEL (SEQ ID NO: 13631):SPIN-AA¹⁷-LYF (SEQ ID NO: 13811), GIPEPXX (SEQ ID NO: 13650):VPEKM (SEQ ID NO: 13616):SPIN-AA¹⁷-LYF (SEQ ID NO: 13811), SIPKAXX (SEQ ID NO: 13660):VPTEL (SEQ ID NO: 13631):SPIN-AA¹⁷-LYF (SEQ ID NO: 13811), HVTKPTX (SEQ ID NO: 13653):APTKL (SEQ ID NO: 13579):SPIN-AA¹⁷-LYF (SEQ ID NO: 13811), YVPKPXX (SEQ ID NO: 13664):APTKL (SEQ ID NO: 13579):SPIN-AA¹⁷-LYF (SEQ ID NO: 13811), TVPKPXX (SEQ ID NO: 13663):APTQL (SEQ ID NO: 13582):SPIN-AA¹⁷-LYF (SEQ ID NO: 13811), AVPKAXX (SEQ ID NO: 13649):APTKL (SEQ ID NO: 13579):SPIN-AA¹⁷-LYF (SEQ ID NO: 13811), KVGKAXX (SEQ ID NO: 13656):VPTKL (SEQ ID NO: 13633):SPIN-AA¹⁷-LYF (SEQ ID NO: 13811), KASKAXX (SEQ ID NO: 13654):VPTKL (SEQ ID NO: 13633):SPIN-AA¹⁷-LYF (SEQ ID NO: 13811), AAPASXX (SEQ ID NO: 13646):VPARL (SEQ ID NO: 13611):SPIN-AA¹⁷-LYF (SEQ ID NO: 13811), STPPTXX (SEQ ID NO: 13662):VPTRL (SEQ ID NO: 13637):SPIN-AA¹⁷-LYF (SEQ ID NO: 13811), HVPKPXX (SEQ ID NO: 13652):APTKL (SEQ ID NO: 13579):SPIN-AA¹⁷-LYF (SEQ ID NO: 13811), RVPSTXX (SEQ ID NO: 13659):APVKT (SEQ ID NO: 13589):SPIN-AA¹⁷-LYF (SEQ ID NO: 13811), ASAAPXX (SEQ ID NO: 13647):VPQAL (SEQ ID NO: 13620):SPIN-AA¹⁷-LYF (SEQ ID NO: 13811), ASASPXX (SEQ ID NO: 13648):VSQDL (SEQ ID NO: 13639):SPIN-AA¹⁷-LYF (SEQ ID NO: 13811), ASASPXX (SEQ ID NO: 13648):VPQDL (SEQ ID NO: 13621):SPIN-AA¹⁷-LYF (SEQ ID NO: 13811), NDEGLEX (SEQ ID NO: 13657):VPTEE (SEQ ID NO: 13630):SPIN-AA¹⁷-LYF (SEQ ID NO: 13811), NDEGLEX (SEQ ID NO: 13657):VPTGQ (SEQ ID NO: 13632):SPIN-AA¹⁷-LYF (SEQ ID NO: 13811), SSVKXQP (SEQ ID NO: 13661):SRVHH (SEQ ID NO: 13592):SPIN-AA¹⁷-LYF (SEQ ID NO: 13811), RNVQXRP (SEQ ID NO: 13658):TQVQL (SEQ ID NO: 13603):SPIN-AA¹⁷-LYF (SEQ ID NO: 13811), KIPKAXX (SEQ ID NO: 13655):VPAEL (SEQ ID NO: 13606):SPIS-AA¹⁷-LYI (SEQ ID NO: 13813), GIPEPXX (SEQ ID NO: 13650):VPAKM (SEQ ID NO: 13608):SPIS-AA¹⁷-LYI (SEQ ID NO: 13813), SIPKAXX (SEQ ID NO: 13660):VPAEL (SEQ ID NO: 13606):SPIS-AA¹⁷-LYI (SEQ ID NO: 13813), HVTKPTX (SEQ ID NO: 13653):VPAKL (SEQ ID NO: 13607):SPIS-AA¹⁷-LYI (SEQ ID NO: 13813), YVPKPXX (SEQ ID NO: 13664):VPAKL (SEQ ID NO: 13607):SPIS-AA¹⁷-LYI (SEQ ID NO: 13813), TVPKPXX (SEQ ID NO: 13663):VPAQL (SEQ ID NO: 13610):SPIS-AA¹⁷-LYI (SEQ ID NO: 13813), AVPKAXX (SEQ ID NO: 13649):VPAKL (SEQ ID NO: 13607):SPIS-AA¹⁷-LYI (SEQ ID NO: 13813), KVGKAXX (SEQ ID NO: 13656):VPAKL (SEQ ID NO: 13607):SPIS-AA¹⁷-LYI (SEQ ID NO: 13813), KASKAXX (SEQ ID NO: 13654):VPAKL (SEQ ID NO: 13607):SPIS-AA¹⁷-LYI (SEQ ID NO: 13813), GSAGPXX (SEQ ID NO: 13651):VPAKM (SEQ ID NO: 13608):SPIS-AA¹⁷-LYI (SEQ ID NO: 13813), STPPTXX (SEQ ID NO: 13662):VPARL (SEQ ID NO: 13611):SPIS-AA¹⁷-LYI (SEQ ID NO: 13813), HVPKPXX (SEQ ID NO: 13652):VPAKL (SEQ ID NO: 13607):SPIS-AA¹⁷-LYI (SEQ ID NO: 13813), RVPSTXX (SEQ ID NO: 13659):VPAKT (SEQ ID NO: 13609):SPIS-AA¹⁷-LYI (SEQ ID NO: 13813), ASAAPXX (SEQ ID NO: 13647):VPAAL (SEQ ID NO: 13604):SPIS-AA¹⁷-LYI (SEQ ID NO: 13813), ASASPXX (SEQ ID NO: 13648):VPADL (SEQ ID NO: 13605):SPIS-AA¹⁷-LYI (SEQ ID NO: 13813), KIPKAXX (SEQ ID NO: 13655):VPTEL (SEQ ID NO: 13631):SPIS-AA¹⁷-LYI (SEQ ID NO: 13813), GIPEPXX (SEQ ID NO: 13650):VPEKM (SEQ ID NO: 13616):SPIS-AA¹⁷-LYI (SEQ ID NO: 13813), SIPKAXX (SEQ ID NO: 13660):VPTEL (SEQ ID NO: 13631):SPIS-AA¹⁷-LYI (SEQ ID NO: 13813), HVTKPTX (SEQ ID NO: 13653):APTKL (SEQ ID NO: 13579):SPIS-AA¹⁷-LYI (SEQ ID NO: 13813), YVPKPXX (SEQ ID NO: 13664):APTKL (SEQ ID NO: 13579):SPIS-AA¹⁷-LYI (SEQ ID NO: 13813), TVPKPXX (SEQ ID NO: 13663):APTQL (SEQ ID NO: 13582):SPIS-AA¹⁷-LYI (SEQ ID NO: 13813), AVPKAXX (SEQ ID NO: 13649):APTKL (SEQ ID NO: 13579):SPIS-AA¹⁷-LYI (SEQ ID NO: 13813), KVGKAXX (SEQ ID NO: 13656):VPTKL (SEQ ID NO: 13633):SPIS-AA¹⁷-LYI (SEQ ID NO: 13813), KASKAXX (SEQ ID NO: 13654):VPTKL (SEQ ID NO: 13633):SPIS-AA¹⁷-LYI (SEQ ID NO: 13813), GSAGPXX (SEQ ID NO: 13651):TPTKM (SEQ ID NO: 13598):SPIS-AA¹⁷-LYI (SEQ ID NO: 13813), STPPTXX (SEQ ID NO: 13662):VPTRL (SEQ ID NO: 13637):SPIS-AA¹⁷-LYI (SEQ ID NO: 13813), HVPKPXX (SEQ ID NO: 13652):APTKL (SEQ ID NO: 13579):SPIS-AA¹⁷-LYI (SEQ ID NO: 13813), RVPSTXX (SEQ ID NO: 13659):APVKT (SEQ ID NO: 13589):SPIS-AA¹⁷-LYI (SEQ ID NO: 13813), ASAAPXX (SEQ ID NO: 13647):VPQAL (SEQ ID NO: 13620):SPIS-AA¹⁷-LYI (SEQ ID NO: 13813), ASASPXX (SEQ ID NO: 13648):VSQDL (SEQ ID NO: 13639):SPIS-AA¹⁷-LYI (SEQ ID NO: 13813), ASASPXX (SEQ ID NO: 13648):VPQDL (SEQ ID NO: 13621):SPIS-AA¹⁷-LYI (SEQ ID NO: 13813), NDEGLEX (SEQ ID NO: 13657):VPTEE (SEQ ID NO: 13630):SPIS-AA¹⁷-LYI (SEQ ID NO: 13813), NDEGLEX (SEQ ID NO: 13657):VPTGQ (SEQ ID NO: 13632):SPIS-AA¹⁷-LYI (SEQ ID NO: 13813), SSVKXQP (SEQ ID NO: 13661):SRVHH (SEQ ID NO: 13592):SPIS-AA¹⁷-LYI (SEQ ID NO: 13813), RNVQXRP (SEQ ID NO: 13658):TQVQL (SEQ ID NO: 13603):SPIS-AA¹⁷-LYI (SEQ ID NO: 13813), KIPKAXX (SEQ ID NO: 13655):VPTEL (SEQ ID NO: 13631):SPIS-AA¹⁷-LFI (SEQ ID NO: 13812), GIPEPXX (SEQ ID NO: 13650):VPTKM (SEQ ID NO: 13634):SPIS-AA¹⁷-LFI (SEQ ID NO: 13812), SIPKAXX (SEQ ID NO: 13660):VPTEL (SEQ ID NO: 13631):SPIS-AA¹⁷-LFI (SEQ ID NO: 13812), HVTKPTX (SEQ ID NO: 13653):VPTKL (SEQ ID NO: 13633):SPIS-AA¹⁷-LFI (SEQ ID NO: 13812), YVPKPXX (SEQ ID NO: 13664):VPTKL (SEQ ID NO: 13633):SPIS-AA¹⁷-LFI (SEQ ID NO: 13812), TVPKPXX (SEQ ID NO: 13663):VPTQL (SEQ ID NO: 13636):SPIS-AA¹⁷-LFI (SEQ ID NO: 13812), AVPKAXX (SEQ ID NO: 13649):VPTKL (SEQ ID NO: 13633):SPIS-AA¹⁷-LFI (SEQ ID NO: 13812), KVGKAXX (SEQ ID NO: 13656):VPTKL (SEQ ID NO: 13633):SPIS-AA¹⁷-LFI (SEQ ID NO: 13812), KASKAXX (SEQ ID NO: 13654):VPTKL (SEQ ID NO: 13633):SPIS-AA¹⁷-LFI (SEQ ID NO: 13812), GSAGPXX (SEQ ID NO: 13651):VPTKM (SEQ ID NO: 13634):SPIS-AA¹⁷-LFI (SEQ ID NO: 13812), AAPASXX (SEQ ID NO: 13646):VPTRL (SEQ ID NO: 13637):SPIS-AA¹⁷-LFI (SEQ ID NO: 13812), HVPKPXX (SEQ ID NO: 13652):VPTKL (SEQ ID NO: 13633):SPIS-AA¹⁷-LFI (SEQ ID NO: 13812), RVPSTXX (SEQ ID NO: 13659):VPTKT (SEQ ID NO: 13635):SPIS-AA¹⁷-LFI (SEQ ID NO: 13812), ASAAPXX (SEQ ID NO: 13647):VPTAL (SEQ ID NO: 13628):SPIS-AA¹⁷-LFI (SEQ ID NO: 13812), ASASPXX (SEQ ID NO: 13648):VPTDL (SEQ ID NO: 13629):SPIS-AA¹⁷-LFI (SEQ ID NO: 13812), GIPEPXX (SEQ ID NO: 13650):VPEKM (SEQ ID NO: 13616):SPIS-AA¹⁷-LFI (SEQ ID NO: 13812), HVTKPTX (SEQ ID NO: 13653):APTKL (SEQ ID NO: 13579):SPIS-AA¹⁷-LFI (SEQ ID NO: 13812), YVPKPXX (SEQ ID NO: 13664):APTKL (SEQ ID NO: 13579):SPIS-AA¹⁷-LFI (SEQ ID NO: 13812), TVPKPXX (SEQ ID NO: 13663):APTQL (SEQ ID NO: 13582):SPIS-AA¹⁷-LFI (SEQ ID NO: 13812), AVPKAXX (SEQ ID NO: 13649):APTKL (SEQ ID NO: 13579):SPIS-AA¹⁷-LFI (SEQ ID NO: 13812), GSAGPXX (SEQ ID NO: 13651):TPTKM (SEQ ID NO: 13598):SPIS-AA¹⁷-LFI (SEQ ID NO: 13812), AAPASXX (SEQ ID NO: 13646):VPARL (SEQ ID NO: 13611):SPIS-AA¹⁷-LFI (SEQ ID NO: 13812), HVPKPXX (SEQ ID NO: 13652):APTKL (SEQ ID NO: 13579):SPIS-AA¹⁷-LFI (SEQ ID NO: 13812), RVPSTXX (SEQ ID NO: 13659):APVKT (SEQ ID NO: 13589):SPIS-AA¹⁷-LFI (SEQ ID NO: 13812), ASAAPXX (SEQ ID NO: 13647):VPQAL (SEQ ID NO: 13620):SPIS-AA¹⁷-LFI (SEQ ID NO: 13812), ASASPXX (SEQ ID NO: 13648):VSQDL (SEQ ID NO: 13639):SPIS-AA¹⁷-LFI (SEQ ID NO: 13812), ASASPXX (SEQ ID NO: 13648):VPQDL (SEQ ID NO: 13621):SPIS-AA¹⁷-LFI (SEQ ID NO: 13812), SSVKXQP (SEQ ID NO: 13661):SRVHH (SEQ ID NO: 13592):SPIS-AA¹⁷-LFI (SEQ ID NO: 13812), RNVQXRP (SEQ ID NO: 13658):TQVQL (SEQ ID NO: 13603):SPIS-AA¹⁷-LFI (SEQ ID NO: 13812), KIPKAXX (SEQ ID NO: 13655):APVEL (SEQ ID NO: 13586):KPLS-AA¹⁷-LYV (SEQ ID NO: 13804), GIPEPXX (SEQ ID NO: 13650):APVKM (SEQ ID NO: 13588):KPLS-AA¹⁷-LYV (SEQ ID NO: 13804), SIPKAXX (SEQ ID NO: 13660):APVEL (SEQ ID NO: 13586):KPLS-AA¹⁷-LYV (SEQ ID NO: 13804), HVTKPTX (SEQ ID NO: 13653):APVKL (SEQ ID NO: 13587):KPLS-AA¹⁷-LYV (SEQ ID NO: 13804), YVPKPXX (SEQ ID NO: 13664):APVKL (SEQ ID NO: 13587):KPLS-AA¹⁷-LYV (SEQ ID NO: 13804), TVPKPXX (SEQ ID NO: 13663):APVQL (SEQ ID NO: 13590):KPLS-AA¹⁷-LYV (SEQ ID NO: 13804), AVPKAXX (SEQ ID NO: 13649):APVKL (SEQ ID NO: 13587):KPLS-AA¹⁷-LYV (SEQ ID NO: 13804), KVGKAXX (SEQ ID NO: 13656):APVKL (SEQ ID NO: 13587):KPLS-AA¹⁷-LYV (SEQ ID NO: 13804), KASKAXX (SEQ ID NO: 13654):APVKL (SEQ ID NO: 13587):KPLS-AA¹⁷-LYV (SEQ ID NO: 13804), GSAGPXX (SEQ ID NO: 13651):APVKM (SEQ ID NO: 13588):KPLS-AA¹⁷-LYV (SEQ ID NO: 13804), AAPASXX (SEQ ID NO: 13646):APVRL (SEQ ID NO: 13591):KPLS-AA¹⁷-LYV (SEQ ID NO: 13804), STPPTXX (SEQ ID NO: 13662):APVRL (SEQ ID NO: 13591):KPLS-AA¹⁷-LYV (SEQ ID NO: 13804), HVPKPXX (SEQ ID NO: 13652):APVKL (SEQ ID NO: 13587):KPLS-AA¹⁷-LYV (SEQ ID NO: 13804), ASAAPXX (SEQ ID NO: 13647):APVAL (SEQ ID NO: 13584):KPLS-AA¹⁷-LYV (SEQ ID NO: 13804), ASASPXX (SEQ ID NO: 13648):APVDL (SEQ ID NO: 13585):KPLS-AA¹⁷-LYV (SEQ ID NO: 13804), KIPKAXX (SEQ ID NO: 13655):VPTEL (SEQ ID NO: 13631):KPLS-AA¹⁷-LYV (SEQ ID NO: 13804), GIPEPXX (SEQ ID NO: 13650):VPEKM (SEQ ID NO: 13616):KPLS-AA¹⁷-LYV (SEQ ID NO: 13804), SIPKAXX (SEQ ID NO: 13660):VPTEL (SEQ ID NO: 13631):KPLS-AA¹⁷-LYV (SEQ ID NO: 13804), HVTKPTX (SEQ ID NO: 13653):APTKL (SEQ ID NO: 13579):KPLS-AA¹⁷-LYV (SEQ ID NO: 13804), YVPKPXX (SEQ ID NO: 13664):APTKL (SEQ ID NO: 13579):KPLS-AA¹⁷-LYV (SEQ ID NO: 13804), TVPKPXX (SEQ ID NO: 13663):APTQL (SEQ ID NO: 13582):KPLS-AA¹⁷-LYV (SEQ ID NO: 13804), AVPKAXX (SEQ ID NO: 13649):APTKL (SEQ ID NO: 13579):KPLS-AA¹⁷-LYV (SEQ ID NO: 13804), KVGKAXX (SEQ ID NO: 13656):VPTKL (SEQ ID NO: 13633):KPLS-AA¹⁷-LYV (SEQ ID NO: 13804), KASKAXX (SEQ ID NO: 13654):VPTKL (SEQ ID NO: 13633):KPLS-AA¹⁷-LYV (SEQ ID NO: 13804), GSAGPXX (SEQ ID NO: 13651):TPTKM (SEQ ID NO: 13598):KPLS-AA¹⁷-LYV (SEQ ID NO: 13804), AAPASXX (SEQ ID NO: 13646):VPARL (SEQ ID NO: 13611):KPLS-AA¹⁷-LYV (SEQ ID NO: 13804), STPPTXX (SEQ ID NO: 13662):VPTRL (SEQ ID NO: 13637):KPLS-AA¹⁷-LYV (SEQ ID NO: 13804), HVPKPXX (SEQ ID NO: 13652):APTKL (SEQ ID NO: 13579):KPLS-AA¹⁷-LYV (SEQ ID NO: 13804), ASAAPXX (SEQ ID NO: 13647):VPQAL (SEQ ID NO: 13620):KPLS-AA¹⁷-LYV (SEQ ID NO: 13804), ASASPXX (SEQ ID NO: 13648):VSQDL (SEQ ID NO: 13639):KPLS-AA¹⁷-LYV (SEQ ID NO: 13804), ASASPXX (SEQ ID NO: 13648):VPQDL (SEQ ID NO: 13621):KPLS-AA¹⁷-LYV (SEQ ID NO: 13804), NDEGLEX (SEQ ID NO: 13657):VPTEE (SEQ ID NO: 13630):KPLS-AA¹⁷-LYV (SEQ ID NO: 13804), NDEGLEX (SEQ ID NO: 13657):VPTGQ (SEQ ID NO: 13632):KPLS-AA¹⁷-LYV (SEQ ID NO: 13804), SSVKXQP (SEQ ID NO: 13661):SRVHH (SEQ ID NO: 13592):KPLS-AA¹⁷-LYV (SEQ ID NO: 13804), RNVQXRP (SEQ ID NO: 13658):TQVQL (SEQ ID NO: 13603):KPLS-AA¹⁷-LYV (SEQ ID NO: 13804), KIPKAXX (SEQ ID NO: 13655):VPQEL (SEQ ID NO: 13622):EPLP-AA¹⁷-VYY (SEQ ID NO: 13802), GIPEPXX (SEQ ID NO: 13650):VPQKM (SEQ ID NO: 13624):EPLP-AA¹⁷-VYY (SEQ ID NO: 13802), SIPKAXX (SEQ ID NO: 13660):VPQEL (SEQ ID NO: 13622):EPLP-AA¹⁷-VYY (SEQ ID NO: 13802), HVTKPTX (SEQ ID NO: 13653):VPQKL (SEQ ID NO: 13623):EPLP-AA¹⁷-VYY (SEQ ID NO: 13802), YVPKPXX (SEQ ID NO: 13664):VPQKL (SEQ ID NO: 13623):EPLP-AA¹⁷-VYY (SEQ ID NO: 13802), TVPKPXX (SEQ ID NO: 13663):VPQQL (SEQ ID NO: 13626):EPLP-AA¹⁷-VYY (SEQ ID NO: 13802), AVPKAXX (SEQ ID NO: 13649):VPQKL (SEQ ID NO: 13623):EPLP-AA¹⁷-VYY (SEQ ID NO: 13802), KVGKAXX (SEQ ID NO: 13656):VPQKL (SEQ ID NO: 13623):EPLP-AA¹⁷-VYY (SEQ ID NO: 13802), KASKAXX (SEQ ID NO: 13654):VPQKL (SEQ ID NO: 13623):EPLP-AA¹⁷-VYY (SEQ ID NO: 13802), GSAGPXX (SEQ ID NO: 13651):VPQKM (SEQ ID NO: 13624):EPLP-AA¹⁷-VYY (SEQ ID NO: 13802), AAPASXX (SEQ ID NO: 13646):VPQRL (SEQ ID NO: 13627):EPLP-AA¹⁷-VYY (SEQ ID NO: 13802), STPPTXX (SEQ ID NO: 13662):VPQRL (SEQ ID NO: 13627):EPLP-AA¹⁷-VYY (SEQ ID NO: 13802), HVPKPXX (SEQ ID NO: 13652):VPQKL (SEQ ID NO: 13623):EPLP-AA¹⁷-VYY (SEQ ID NO: 13802), RVPSTXX (SEQ ID NO: 13659):VPQKT (SEQ ID NO: 13625):EPLP-AA¹⁷-VYY (SEQ ID NO: 13802), ASASPXX (SEQ ID NO: 13648):VPQDL (SEQ ID NO: 13621):EPLP-AA¹⁷-VYY (SEQ ID NO: 13802), KIPKAXX (SEQ ID NO: 13655):VPTEL (SEQ ID NO: 13631):EPLP-AA¹⁷-VYY (SEQ ID NO: 13802), GIPEPXX (SEQ ID NO: 13650):VPEKM (SEQ ID NO: 13616):EPLP-AA¹⁷-VYY (SEQ ID NO: 13802), SIPKAXX (SEQ ID NO: 13660):VPTEL (SEQ ID NO: 13631):EPLP-AA¹⁷-VYY (SEQ ID NO: 13802), HVTKPTX (SEQ ID NO: 13653):APTKL (SEQ ID NO: 13579):EPLP-AA¹⁷-VYY (SEQ ID NO: 13802), YVPKPXX (SEQ ID NO: 13664):APTKL (SEQ ID NO: 13579):EPLP-AA¹⁷-VYY (SEQ ID NO: 13802), TVPKPXX (SEQ ID NO: 13663):APTQL (SEQ ID NO: 13582):EPLP-AA¹⁷-VYY (SEQ ID NO: 13802), AVPKAXX (SEQ ID NO: 13649):APTKL (SEQ ID NO: 13579):EPLP-AA¹⁷-VYY (SEQ ID NO: 13802), KVGKAXX (SEQ ID NO: 13656):VPTKL (SEQ ID NO: 13633):EPLP-AA¹⁷-VYY (SEQ ID NO: 13802), KASKAXX (SEQ ID NO: 13654):VPTKL (SEQ ID NO: 13633):EPLP-AA¹⁷-VYY (SEQ ID NO: 13802), GSAGPXX (SEQ ID NO: 13651):TPTKM (SEQ ID NO: 13598):EPLP-AA¹⁷-VYY (SEQ ID NO: 13802), AAPASXX (SEQ ID NO: 13646):VPARL (SEQ ID NO: 13611):EPLP-AA¹⁷-VYY (SEQ ID NO: 13802), STPPTXX (SEQ ID NO: 13662):VPTRL (SEQ ID NO: 13637):EPLP-AA¹⁷-VYY (SEQ ID NO: 13802), HVPKPXX (SEQ ID NO: 13652):APTKL (SEQ ID NO: 13579):EPLP-AA¹⁷-VYY (SEQ ID NO: 13802), RVPSTXX (SEQ ID NO: 13659):APVKT (SEQ ID NO: 13589):EPLP-AA¹⁷-VYY (SEQ ID NO: 13802), ASASPXX (SEQ ID NO: 13648):VSQDL (SEQ ID NO: 13639):EPLP-AA¹⁷-VYY (SEQ ID NO: 13802), NDEGLEX (SEQ ID NO: 13657):VPTEE (SEQ ID NO: 13630):EPLP-AA¹⁷-VYY (SEQ ID NO: 13802), NDEGLEX (SEQ ID NO: 13657):VPTGQ (SEQ ID NO: 13632):EPLP-AA¹⁷-VYY (SEQ ID NO: 13802), SSVKXQP (SEQ ID NO: 13661):SRVHH (SEQ ID NO: 13592):EPLP-AA¹⁷-VYY (SEQ ID NO: 13802), RNVQXRP (SEQ ID NO: 13658):TQVQL (SEQ ID NO: 13603):EPLP-AA¹⁷-VYY (SEQ ID NO: 13802), KIPKAXX (SEQ ID NO: 13655):VSQEL (SEQ ID NO: 13640):EPLT-AA¹⁷-LYY (SEQ ID NO: 13803), GIPEPXX (SEQ ID NO: 13650):VSQKM (SEQ ID NO: 13642):EPLT-AA¹⁷-LYY (SEQ ID NO: 13803), SIPKAXX (SEQ ID NO: 13660):VSQEL (SEQ ID NO: 13640):EPLT-AA¹⁷-LYY (SEQ ID NO: 13803), HVTKPTX (SEQ ID NO: 13653):VSQKL (SEQ ID NO: 13641):EPLT-AA¹⁷-LYY (SEQ ID NO: 13803), YVPKPXX (SEQ ID NO: 13664):VSQKL (SEQ ID NO: 13641):EPLT-AA¹⁷-LYY (SEQ ID NO: 13803), TVPKPXX (SEQ ID NO: 13663):VSQQL (SEQ ID NO: 13644):EPLT-AA¹⁷-LYY (SEQ ID NO: 13803), AVPKAXX (SEQ ID NO: 13649):VSQKL (SEQ ID NO: 13641):EPLT-AA¹⁷-LYY (SEQ ID NO: 13803), KVGKAXX (SEQ ID NO: 13656):VSQKL (SEQ ID NO: 13641):EPLT-AA¹⁷-LYY (SEQ ID NO: 13803), KASKAXX (SEQ ID NO: 13654):VSQKL (SEQ ID NO: 13641):EPLT-AA¹⁷-LYY (SEQ ID NO: 13803), GSAGPXX (SEQ ID NO: 13651):VSQKM (SEQ ID NO: 13642):EPLT-AA¹⁷-LYY (SEQ ID NO: 13803), AAPASXX (SEQ ID NO: 13646):VSQRL (SEQ ID NO: 13645):EPLT-AA¹⁷-LYY (SEQ ID NO: 13803), STPPTXX (SEQ ID NO: 13662):VSQRL (SEQ ID NO: 13645):EPLT-AA¹⁷-LYY (SEQ ID NO: 13803), HVPKPXX (SEQ ID NO: 13652):VSQKL (SEQ ID NO: 13641):EPLT-AA¹⁷-LYY (SEQ ID NO: 13803), RVPSTXX (SEQ ID NO: 13659):VSQKT (SEQ ID NO: 13643):EPLT-AA¹⁷-LYY (SEQ ID NO: 13803), ASAAPXX (SEQ ID NO: 13647):VSQAL (SEQ ID NO: 13638):EPLT-AA¹⁷-LYY (SEQ ID NO: 13803), ASASPXX (SEQ ID NO: 13648):VSQDL (SEQ ID NO: 13639):EPLT-AA¹⁷-LYY (SEQ ID NO: 13803), KIPKAXX (SEQ ID NO: 13655):VPTEL (SEQ ID NO: 13631):EPLT-AA¹⁷-LYY (SEQ ID NO: 13803), GIPEPXX (SEQ ID NO: 13650):VPEKM (SEQ ID NO: 13616):EPLT-AA¹⁷-LYY (SEQ ID NO: 13803), SIPKAXX (SEQ ID NO: 13660):VPTEL (SEQ ID NO: 13631):EPLT-AA¹⁷-LYY (SEQ ID NO: 13803), HVTKPTX (SEQ ID NO: 13653):APTKL (SEQ ID NO: 13579):EPLT-AA¹⁷-LYY (SEQ ID NO: 13803), YVPKPXX (SEQ ID NO: 13664):APTKL (SEQ ID NO: 13579):EPLT-AA¹⁷-LYY (SEQ ID NO: 13803), TVPKPXX (SEQ ID NO: 13663):APTQL (SEQ ID NO: 13582):EPLT-AA¹⁷-LYY (SEQ ID NO: 13803), AVPKAXX (SEQ ID NO: 13649):APTKL (SEQ ID NO: 13579):EPLT-AA¹⁷-LYY (SEQ ID NO: 13803), KVGKAXX (SEQ ID NO: 13656):VPTKL (SEQ ID NO: 13633):EPLT-AA¹⁷-LYY (SEQ ID NO: 13803), KASKAXX (SEQ ID NO: 13654):VPTKL (SEQ ID NO: 13633):EPLT-AA¹⁷-LYY (SEQ ID NO: 13803), GSAGPXX (SEQ ID NO: 13651):TPTKM (SEQ ID NO: 13598):EPLT-AA¹⁷-LYY (SEQ ID NO: 13803), AAPASXX (SEQ ID NO: 13646):VPARL (SEQ ID NO: 13611):EPLT-AA¹⁷-LYY (SEQ ID NO: 13803), STPPTXX (SEQ ID NO: 13662):VPTRL (SEQ ID NO: 13637):EPLT-AA¹⁷-LYY (SEQ ID NO: 13803), HVPKPXX (SEQ ID NO: 13652):APTKL (SEQ ID NO: 13579):EPLT-AA¹⁷-LYY (SEQ ID NO: 13803), RVPSTXX (SEQ ID NO: 13659):APVKT (SEQ ID NO: 13589):EPLT-AA¹⁷-LYY (SEQ ID NO: 13803), ASAAPXX (SEQ ID NO: 13647):VPQAL (SEQ ID NO: 13620):EPLT-AA¹⁷-LYY (SEQ ID NO: 13803), NDEGLEX (SEQ ID NO: 13657):VPTEE (SEQ ID NO: 13630):EPLT-AA¹⁷-LYY (SEQ ID NO: 13803), NDEGLEX (SEQ ID NO: 13657):VPTGQ (SEQ ID NO: 13632):EPLT-AA¹⁷-LYY (SEQ ID NO: 13803), SSVKXQP (SEQ ID NO: 13661):SRVHH (SEQ ID NO: 13592):EPLT-AA¹⁷-LYY (SEQ ID NO: 13803), RNVQXRP (SEQ ID NO: 13658):TQVQL (SEQ ID NO: 13603):EPLT-AA¹⁷-LYY (SEQ ID NO: 13803), KIPKAXX (SEQ ID NO: 13655):VPQEL (SEQ ID NO: 13622):EPLT-AA¹⁷-LYY (SEQ ID NO: 13803), GIPEPXX (SEQ ID NO: 13650):VPQKM (SEQ ID NO: 13624):EPLT-AA¹⁷-LYY (SEQ ID NO: 13803), SIPKAXX (SEQ ID NO: 13660):VPQEL (SEQ ID NO: 13622):EPLT-AA¹⁷-LYY (SEQ ID NO: 13803), HVTKPTX (SEQ ID NO: 13653):VPQKL (SEQ ID NO: 13623):EPLT-AA¹⁷-LYY (SEQ ID NO: 13803), YVPKPXX (SEQ ID NO: 13664):VPQKL (SEQ ID NO: 13623):EPLT-AA¹⁷-LYY (SEQ ID NO: 13803), TVPKPXX (SEQ ID NO: 13663):VPQQL (SEQ ID NO: 13626):EPLT-AA¹⁷-LYY (SEQ ID NO: 13803), AVPKAXX (SEQ ID NO: 13649):VPQKL (SEQ ID NO: 13623):EPLT-AA¹⁷-LYY (SEQ ID NO: 13803), KVGKAXX (SEQ ID NO: 13656):VPQKL (SEQ ID NO: 13623):EPLT-AA¹⁷-LYY (SEQ ID NO: 13803), KASKAXX (SEQ ID NO: 13654):VPQKL (SEQ ID NO: 13623):EPLT-AA¹⁷-LYY (SEQ ID NO: 13803), GSAGPXX (SEQ ID NO: 13651):VPQKM (SEQ ID NO: 13624):EPLT-AA¹⁷-LYY (SEQ ID NO: 13803), AAPASXX (SEQ ID NO: 13646):VPQRL (SEQ ID NO: 13627):EPLT-AA¹⁷-LYY (SEQ ID NO: 13803), STPPTXX (SEQ ID NO: 13662):VPQRL (SEQ ID NO: 13627):EPLT-AA¹⁷-LYY (SEQ ID NO: 13803), HVPKPXX (SEQ ID NO: 13652):VPQKL (SEQ ID NO: 13623):EPLT-AA¹⁷-LYY (SEQ ID NO: 13803), RVPSTXX (SEQ ID NO: 13659):VPQKT (SEQ ID NO: 13625):EPLT-AA¹⁷-LYY (SEQ ID NO: 13803), ASASPXX (SEQ ID NO: 13648):VPQDL (SEQ ID NO: 13621):EPLT-AA¹⁷-LYY (SEQ ID NO: 13803), NDEGLEX (SEQ ID NO: 13657):VPTGQ (SEQ ID NO: 13632):SNIT-AA¹⁷-QIM (SEQ ID NO: 13810), GIPEPXX (SEQ ID NO: 13650):VPEKM (SEQ ID NO: 13616):SNIT-AA¹⁷-QIM (SEQ ID NO: 13810), HVTKPTX (SEQ ID NO: 13653):APTKL (SEQ ID NO: 13579):SNIT-AA¹⁷-QIM (SEQ ID NO: 13810), YVPKPXX (SEQ ID NO: 13664):APTKL (SEQ ID NO: 13579):SNIT-AA¹⁷-QIM (SEQ ID NO: 13810), TVPKPXX (SEQ ID NO: 13663):APTQL (SEQ ID NO: 13582):SNIT-AA¹⁷-QIM (SEQ ID NO: 13810), AVPKAXX (SEQ ID NO: 13649):APTKL (SEQ ID NO: 13579):SNIT-AA¹⁷-QIM (SEQ ID NO: 13810), GSAGPXX (SEQ ID NO: 13651):TPTKM (SEQ ID NO: 13598):SNIT-AA¹⁷-QIM (SEQ ID NO: 13810), AAPASXX (SEQ ID NO: 13646):VPARL (SEQ ID NO: 13611):SNIT-AA¹⁷-QIM (SEQ ID NO: 13810), HVPKPXX (SEQ ID NO: 13652):APTKL (SEQ ID NO: 13579):SNIT-AA¹⁷-QIM (SEQ ID NO: 13810), RVPSTXX (SEQ ID NO: 13659):APVKT (SEQ ID NO: 13589):SNIT-AA¹⁷-QIM (SEQ ID NO: 13810), ASAAPXX (SEQ ID NO: 13647):VPQAL (SEQ ID NO: 13620):SNIT-AA¹⁷-QIM (SEQ ID NO: 13810), ASASPXX (SEQ ID NO: 13648):VSQDL (SEQ ID NO: 13639):SNIT-AA¹⁷-QIM (SEQ ID NO: 13810), ASASPXX (SEQ ID NO: 13648):VPQDL (SEQ ID NO: 13621):SNIT-AA¹⁷-QIM (SEQ ID NO: 13810), SSVKXQP (SEQ ID NO: 13661):SRVHH (SEQ ID NO: 13592):SNIT-AA¹⁷-QIM (SEQ ID NO: 13810), RNVQXRP (SEQ ID NO: 13658):TQVQL (SEQ ID NO: 13603):SNIT-AA¹⁷-QIM (SEQ ID NO: 13810), RNVQXRP (SEQ ID NO: 13658):SRVQL (SEQ ID NO: 13593):RSVK-AA¹⁷-AKV (SEQ ID NO: 13807), KIPKAXX (SEQ ID NO: 13655):VPTEL (SEQ ID NO: 13631):RSVK-AA¹⁷-AKV (SEQ ID NO: 13807), GIPEPXX (SEQ ID NO: 13650):VPEKM (SEQ ID NO: 13616):RSVK-AA¹⁷-AKV (SEQ ID NO: 13807), SIPKAXX (SEQ ID NO: 13660):VPTEL (SEQ ID NO: 13631):RSVK-AA¹⁷-AKV (SEQ ID NO: 13807), HVTKPTX (SEQ ID NO: 13653):APTKL (SEQ ID NO: 13579):RSVK-AA¹⁷-AKV (SEQ ID NO: 13807), YVPKPXX (SEQ ID NO: 13664):APTKL (SEQ ID NO: 13579):RSVK-AA¹⁷-AKV (SEQ ID NO: 13807), TVPKPXX (SEQ ID NO: 13663):APTQL (SEQ ID NO: 13582):RSVK-AA¹⁷-AKV (SEQ ID NO: 13807), AVPKAXX (SEQ ID NO: 13649):APTKL (SEQ ID NO: 13579):RSVK-AA¹⁷-AKV (SEQ ID NO: 13807), KVGKAXX (SEQ ID NO: 13656):VPTKL (SEQ ID NO: 13633):RSVK-AA¹⁷-AKV (SEQ ID NO: 13807), KASKAXX (SEQ ID NO: 13654):VPTKL (SEQ ID NO: 13633):RSVK-AA¹⁷-AKV (SEQ ID NO: 13807), GSAGPXX (SEQ ID NO: 13651):TPTKM (SEQ ID NO: 13598):RSVK-AA¹⁷-AKV (SEQ ID NO: 13807), AAPASXX (SEQ ID NO: 13646):VPARL (SEQ ID NO: 13611):RSVK-AA¹⁷-AKV (SEQ ID NO: 13807), STPPTXX (SEQ ID NO: 13662):VPTRL (SEQ ID NO: 13637):RSVK-AA¹⁷-AKV (SEQ ID NO: 13807), HVPKPXX (SEQ ID NO: 13652):APTKL (SEQ ID NO: 13579):RSVK-AA¹⁷-AKV (SEQ ID NO: 13807), RVPSTXX (SEQ ID NO: 13659):APVKT (SEQ ID NO: 13589):RSVK-AA¹⁷-AKV (SEQ ID NO: 13807), ASAAPXX (SEQ ID NO: 13647):VPQAL (SEQ ID NO: 13620):RSVK-AA¹⁷-AKV (SEQ ID NO: 13807), ASASPXX (SEQ ID NO: 13648):VSQDL (SEQ ID NO: 13639):RSVK-AA¹⁷-AKV (SEQ ID NO: 13807), ASASPXX (SEQ ID NO: 13648):VPQDL (SEQ ID NO: 13621):RSVK-AA¹⁷-AKV (SEQ ID NO: 13807), NDEGLEX (SEQ ID NO: 13657):VPTEE (SEQ ID NO: 13630):RSVK-AA¹⁷-AKV (SEQ ID NO: 13807), NDEGLEX (SEQ ID NO: 13657):VPTGQ (SEQ ID NO: 13632):RSVK-AA¹⁷-AKV (SEQ ID NO: 13807), RNVQXRP (SEQ ID NO: 13658):TQVQL (SEQ ID NO: 13603):RSVK-AA¹⁷-AKV (SEQ ID NO: 13807), SSVKXQP (SEQ ID NO: 13661):TQVHH (SEQ ID NO: 13602):RPVQ-AA¹⁷-RKI (SEQ ID NO: 13806), KIPKAXX (SEQ ID NO: 13655):VPTEL (SEQ ID NO: 13631):RPVQ-AA¹⁷-RKI (SEQ ID NO: 13806), GIPEPXX (SEQ ID NO: 13650):VPEKM (SEQ ID NO: 13616):RPVQ-AA¹⁷-RKI (SEQ ID NO: 13806), SIPKAXX (SEQ ID NO: 13660):VPTEL (SEQ ID NO: 13631):RPVQ-AA¹⁷-RKI (SEQ ID NO: 13806), HVTKPTX (SEQ ID NO: 13653):APTKL (SEQ ID NO: 13579):RPVQ-AA¹⁷-RKI (SEQ ID NO: 13806), YVPKPXX (SEQ ID NO: 13664):APTKL (SEQ ID NO: 13579):RPVQ-AA¹⁷-RKI (SEQ ID NO: 13806), TVPKPXX (SEQ ID NO: 13663):APTQL (SEQ ID NO: 13582):RPVQ-AA¹⁷-RKI (SEQ ID NO: 13806), AVPKAXX (SEQ ID NO: 13649):APTKL (SEQ ID NO: 13579):RPVQ-AA¹⁷-RKI (SEQ ID NO: 13806), KVGKAXX (SEQ ID NO: 13656):VPTKL (SEQ ID NO: 13633):RPVQ-AA¹⁷-RKI (SEQ ID NO: 13806), KASKAXX (SEQ ID NO: 13654):VPTKL (SEQ ID NO: 13633):RPVQ-AA¹⁷-RKI (SEQ ID NO: 13806), GSAGPXX (SEQ ID NO: 13651):TPTKM (SEQ ID NO: 13598):RPVQ-AA¹⁷-RKI (SEQ ID NO: 13806), AAPASXX (SEQ ID NO: 13646):VPARL (SEQ ID NO: 13611):RPVQ-AA¹⁷-RKI (SEQ ID NO: 13806), STPPTXX (SEQ ID NO: 13662):VPTRL (SEQ ID NO: 13637):RPVQ-AA¹⁷-RKI (SEQ ID NO: 13806), HVPKPXX (SEQ ID NO: 13652):APTKL (SEQ ID NO: 13579):RPVQ-AA¹⁷-RKI (SEQ ID NO: 13806), RVPSTXX (SEQ ID NO: 13659):APVKT (SEQ ID NO: 13589):RPVQ-AA¹⁷-RKI (SEQ ID NO: 13806), ASAAPXX (SEQ ID NO: 13647):VPQAL (SEQ ID NO: 13620):RPVQ-AA¹⁷-RKI (SEQ ID NO: 13806), ASASPXX (SEQ ID NO: 13648):VSQDL (SEQ ID NO: 13639):RPVQ-AA¹⁷-RKI (SEQ ID NO: 13806), ASASPXX (SEQ ID NO: 13648):VPQDL (SEQ ID NO: 13621):RPVQ-AA¹⁷-RKI (SEQ ID NO: 13806), NDEGLEX (SEQ ID NO: 13657):VPTEE (SEQ ID NO: 13630):RPVQ-AA¹⁷-RKI (SEQ ID NO: 13806), NDEGLEX (SEQ ID NO: 13657):VPTGQ (SEQ ID NO: 13632):RPVQ-AA¹⁷-RKI (SEQ ID NO: 13806) and SSVKXQP (SEQ ID NO: 13661):SRVHH (SEQ ID NO: 13592):RPVQ-AA17-RKI (SEQ ID NO: 13806); and wherein AA¹⁷ is selected from the group consisting of G, A, V, L, I, P, F, M, W, T and S (in particular is selected from the group consisting of M, I, L, V and T).

[0386] In one example, said cyclic GFR-binding compound is a synthetic molecule as defined herein in the definition section.

[0387] In one particular example, said cyclic GFR-binding compound is a synthetic peptide, or a variant or analog thereof, or a cyclic peptidomimetic.

[0388] In one most particular example, said cyclic GFR-binding compound is a cyclic synthetic peptide.

[0389] In one example, a length of said cyclic GFR-binding compound, in solution, such as in a physiologically acceptable solvent such as water or PBS, is comprised between about 6 and about 20 nm, preferably between about 6 and about 16 nm, as determined using the standard «3D» procedure described above.

[0390] In one particular example, said cyclic GFR-binding compounds may be any one of peptides of SEQ ID NO: 4803 to 13564.

### LINKER Suitable for Implementing Cyclic GFR-Compounds' Embodiments

[0391] In one particular example, said LINKER has a Mw comprised between 450 and 4,500 Daltons, in particular comprised between about 600 and about 4,500 Da, more particularly between about 600 and about 4,000 Da, and even more particularly between about 600 and about 3,500 Da.

[0392] The chemical nature of said LINKER is not meant to be particularly limited and may be any organic molecule capable of covalently connecting two ends of a peptide or a peptidomimetic such as PEP(A) or PEP(C)-PEP12 so as to form a cyclic compound and so long as LINKER provides sufficient cycle stability for the pharmaceutical association, combination or composition as defined herein to promote the conversion or recoding of a neoplastic cell into a non-neoplastic cell. LINKER may thus be, for example, in certain embodiments, a peptide, or variant, analog or peptidomimetic thereof, a polysaccharide, a polynucleotide, a saturated or unsaturated hydrocarbon chain, or a mixture thereof.

[0393] For example, in certain embodiments, LINKER is a peptide with 6 to 31 amino acids. In one particular example, LINKER is a peptide with 6 to 25 amino acids. In one particular example, LINKER is a peptide with 8 to 25 amino acids. In one most particular example, LINKER is a peptide with 8 to 20 amino acids.

[0394] Thus, in one particular example, said cyclic GFR-binding compound is a peptide, a variant or analog thereof as defined herein, with between 10-60 (in particular between 15-60, more particularly between 10-55, and even more particularly between 15-55) amino acids or with between 10-35 (in particular between 15-35, more particularly between 10-30, and even more particularly between 15-30) amino acids, comprising a peptide, a variant or analog thereof of general formula (IIIa); wherein one end of LINKER interacts covalently with one end of PEP(A); wherein PEP(A) comprises PEP1 or PEP12; wherein LINKER is a peptide comprising 6 to 31 amino acids (in particular 6 to 25, 8 to 25, or 8 to 20 amino acids).

[0395] Thus, in one particular example, said cyclic GFR-binding compound is a cyclic peptide, a variant or analog thereof, or a cyclic peptidomimetic as defined herein, with between 10-60 (in particular between 15-60, more particularly between 10-55, and even more particularly between 15-55) amino acids or with between 10-35 (in particular between 15-35, more particularly between 10-30, and even more particularly between 15-30) amino acids, comprising a peptide, a variant or analog thereof, or a peptidomimetic having the following general formula (IIIb); wherein one end of a first LINKER interacts covalently with one end of PEP(A); wherein one end of a second LINKER interacts covalently with another end of PEP(A); wherein another end of a first LINKER interacts covalently with another end of a second LINKER; wherein PEP(A) comprises PEP1 or PEP12; wherein LINKER are independently a peptide comprising 6 to 31 amino acids (in particular 6 to 25, 8 to 25, or 8 to 20 amino acids).

[0396] Thus, in one particular example, said cyclic GFR-binding compound is a peptide, a variant or analog thereof as defined herein, with between 10-60 (in particular between 15-60, more particularly between 10-55, and even more particularly between 15-55) amino acids or with between 10-35 (in particular between 15-35, more particularly between 10-30, and even more particularly between 15-30) amino acids, comprising a peptide, a variant or analog thereof of general formula (IVa); wherein LINKER is a peptide comprising 6 to 31 amino acids (in particular 6 to 25, 8 to 25, or 8 to 20 amino acids); wherein PEP12 is a peptide with 8 amino acids of formula PEP1-AA¹⁷-PEP11 as already defined herein; wherein PEP1, PEP11 and PEP(C) are as already defined herein; wherein AA¹³ may be an N-terminal amino acid or a C-terminal amino acids; wherein AA²⁰ may be an N-terminal amino acid or a C-terminal amino acid; wherein one end of LINKER interacts covalently with one end of PEP12 via AA²⁰; wherein another end of LINKER interacts covalently with one end of PEP(C); wherein another end of PEP(C) interacts covalently with PEP12 via AA¹³.

[0397] Thus, in one particular example, said cyclic GFR-binding compound is a cyclic peptide, a variant or analog thereof, or a cyclic peptidomimetic as defined herein, with between 10-60 (in particular between 15-60, more particularly between 10-55, and even more particularly between 15-55) amino acids or with between 10-35 (in particular between 15-35, more particularly between 10-30, and even more particularly between 15-30) amino acids, comprising a peptide, a variant or analog thereof, or a peptidomimetic having the following general formula (IVb); wherein LINKER are independently a peptide comprising 6 to 31 amino acids (in particular 6 to 25, 8 to 25, or 8 to 20 amino acids); wherein PEP12 is a peptide with 8 amino acids of formula PEP1-AA¹⁷-PEP11 as defined herein; wherein PEP2 is a peptide with five amino acids as already defined herein; wherein one end of PEP(C) interacts covalently with PEP12 via one end of PEP1; wherein one end of a first LINKER interacts covalently with one end of PEP12 via one end of PEP11; wherein one end of a second LINKER interacts covalently with another end of PEP(C); wherein another end of a first LINKER interacts covalently with another end of a second LINKER; wherein PEP(C) is a peptide with at least 5 amino acids, in particular a peptide with between 5 and 12 amino acids.

[0398] Thus, in one particular example, said cyclic GFR-binding compound is a peptide, a variant or analog thereof as defined herein, with between 10-60 (in particular between 15-60, more particularly between 10-55, and even more particularly between 15-55) amino acids or with between 10-35 (in particular between 15-35, more particularly between 10-30, and even more particularly between 15-30) amino acids, having any one of the general formula (VII) to (XXIII); wherein LINKER is a peptide comprising 6 to 31 amino acids (in particular 6 to 25, 8 to 25, or 8 to 20 amino acids).

[0399] In certain embodiments, said cyclic GFR-binding compound is a cyclic peptidomimetic as defined herein, with between 10-60 (in particular between 15-60, more particularly between 10-55, and even more particularly between 15-55) amino acids or with between 10-35 (in particular between 15-35, more particularly between 10-30, and even more particularly between 15-30) amino acids, of general formula (IVa) or (IVb); wherein LINKER is not a peptide but may comprise amino acids or peptides in covalent or non-covalent (preferably covalent) association with other groups or residues other than amino acids or peptides.

[0400] In one particular example, LINKER comprises (or is) a peptide of general formula (XXIV):

*AA²⁰¹-AA²⁰²-AA²⁰³-AA²⁰⁴-AA²⁰⁵-AA²⁰⁶-AA²⁰⁷-AA²⁰⁸-AA²⁰⁹** (XXIV)

wherein said peptide of formula (XXIV) may be selected from the group consisting of *AA^{III}-AA^{I}-AA^{I}-AA^{II}-AA^{VII}-AA^{XII}-AA^{XII}-AA^{XII}-AA^{XIII}**, *AA^{III}-AA^{I}-AA^{VI}-AA^{II}AA^{VII}-AA^{XII}-AA^{XII}AA^{XIII}AA^{XIII}**, *AA^{III}-AA^{I}-AA^{I}-AA^{II}-AA^{II}-AA^{XII}-AA^{XII}-AA^{XIII}-AA^{XIII}**, *AA^{III}-AA^{I}-AA^{II}-AA^{II}-AA^{VII}-AA^{XII}-AA^{XII}-AA^{XIII}-AA^{XIII}**, *AA^{III}-AA^{I}-AA^{II}-AA^{IV}- AA^{IV}-AA^{XII}-AA^{XII}-AA^{XIII}-AA^{XIII}**, *AA^{II}-AA^{I}-AA^{II}-AA^{II}-AA^{II}-AA^{XII}-AA^{XII}-AA^{XIII}-AA^{XIII}**, *AA^{III}-AA^{III}-AA^{II}-AA^{VII}-AA^{II}- AA^{XII}-AA^{XII}-AA^{XIII}-AA^{XIII}**, *AA^{III}-AA^{I}-AA^{I}-AA^{II}-AA^{II}-AA^{XII}-AA^{XII}-AA^{XIII}-AA^{XIII}**, *AA^{V}-AA^{V}-AA^{VII}-AA^{VII}-AA^{XII}-AA^{XII}-AA^{XIII}-AA^{XIII}**, *AA^{VIII}-AA^{V}-AA^{VII}-AA^{II}-AA^{XII}-AA^{XII}-AA^{XIII}-AA^{XIII}** and *AA^{V}-AA^{V}-AA^{VII}-AA^{II}-AA^{XII}-AA^{XII}-AA^{XIII}-AA^{XIII}**, wherein AA^{I} is any amino acid as defined herein, AA^{II} is any polar amino acid as defined herein, AA^{III} is any acidic amino acid as defined herein, AA^{IV} is any aliphatic amino acid as defined herein, AA^{V} is any apolar amino acid as defined herein, AA^{VI} is any aromatic amino acid as defined herein, AA^{VII} is any basic amino acid as defined herein, AA^{VIII} is L or I as defined herein, AA^{XII} is an amino acid selected from the group consisting of G, A, V, L, I, P, M, K, R, H, Y and E, wherein AA^{XIII} is absent, AA^{II} or AA^{VII}, preferably absent; and wherein any one of the fragment AA²⁰¹, AA²⁰¹-AA²⁰², AA²⁰¹-AA²⁰²-AA²⁰³, AA²⁰¹-AA²⁰²-AA²⁰³-AA²⁰⁴, AA²⁰¹-AA²⁰²-AA²⁰³-AA²⁰⁴-AA²⁰⁵, AA²⁰¹-AA²⁰²-AA²⁰³-AA²⁰⁴-AA²⁰⁵-AA²⁰⁶, AA²⁰¹-AA²⁰²-AA²⁰³-AA²⁰⁴-AA²⁰⁵-AA²⁰⁶-AA²⁰⁷, AA²⁰³-AA²⁰⁴-AA²⁰⁵-AA²⁰⁶-AA²⁰⁷-AA²⁰⁸-AA²⁰⁹ , AA²⁰⁴-AA²⁰⁵-AA²⁰⁶-AA²⁰⁷-AA²⁰⁸-AA²⁰⁹, AA²⁰⁵-AA²⁰⁶-AA²⁰⁷-AA²⁰⁸-AA²⁰⁹, AA²⁰⁶-AA²⁰⁷-AA²⁰⁸-AA²⁰⁹, AA²⁰⁷-AA²⁰⁸-AA²⁰⁹, AA²⁰⁸-AA²⁰⁹ or AA²⁰⁹, may be absent. In the peptides of formula (XXIV), any one of the amino acid labelled “*” or the amino acid labelled “**” is an N-terminal amino acid and the other is a C-terminal amino acid.

[0401] For instance, in the peptide of formula *AA^{III}-AA^{I}-AA^{I}-AA^{II}-AA^{VII}-AA^{XII}-AA^{XII}-AA^{XIII}-AA^{XIII}** (XXIV-1), AA^{III} occupies position AA²⁰¹, *AA^{I} occupies position AA²⁰², AA^{I} occupies position AA²⁰³, AA^{II} occupies position AA²⁰⁴, AA^{VII} occupies position AA²⁰⁵, AA^{XII} occupies position AA²⁰⁶, AA^{XII} occupies position AA²⁰⁷, AA^{XIII} occupies position AA²⁰⁸ and AA^{XIII}** occupies position AA²⁰⁹.

[0402] Likewise, in the peptide of formula *AA^{V}-AA^{V}-AA^{VII}-AA^{II}-AA^{XII}-AA^{XII}-AA^{XIII}-AA^{XIII}** (XXIV-1) AA^{V} occupies position AA²⁰¹, AA^{V} occupies position AA²⁰², AA^{VII} occupies position AA²⁰³, AA^{II} occupies position AA²⁰⁴, AA^{XII} occupies position AA²⁰⁵, AA^{XII} occupies position AA²⁰⁶, AA^{XIII} occupies position AA²⁰⁷, AA^{XIII} occupies position AA²⁰⁸ and position AA²⁰⁹ is vacants.

[0403] In one example, LINKER may thus comprise or be any one of the following peptides: *AA²⁰¹-AA²⁰²-AA²⁰³-AA²⁰⁴-AA²⁰⁵-AA²⁰⁶-AA²⁰⁷-AA²⁰⁸** (XXIV-1); *AA²⁰¹-AA²⁰²-AA²⁰³-AA²⁰⁴-AA²⁰⁵-AA²⁰⁶-AA²⁰⁷** (XXIV-2); *AA²⁰¹-AA²⁰²-A²⁰³-AA²⁰⁴-AA²⁰⁵-AA²⁰⁶** (XXIV-3); *AA²⁰¹-AA²⁰²-AA²⁰³-AA²⁰⁴-AA²⁰⁵** (XXIV-4); *AA²⁰¹-AA²⁰²-AA²⁰³-AA²⁰⁴** (XXIV-5); *AA²⁰¹-AA²⁰²-AA²⁰³** (XXIV-6); *AA²⁰¹-AA²⁰²** (XXIV-7); *AA²⁰²-AA²⁰³-AA²⁰⁴-AA²⁰⁵-AA²⁰⁶-AA²⁰⁷-AA²⁰⁸-AA²⁰⁹** (XXIV-8); *AA²⁰³-AA²⁰⁴-AA²⁰⁵-AA²⁰⁶-AA²⁰⁷-AA²⁰⁸-AA²⁰⁹** (XXIV-9); *AA²⁰⁴-AA²⁰⁵-AA²⁰⁶-AA²⁰⁷-AA²⁰⁸-AA²⁰⁹** (XXIV-10); *AA²⁰⁵-AA²⁰⁶-AA²⁰⁷-AA²⁰⁸-AA²⁰⁹** (XXIV-11); *AA²⁰⁶-AA²⁰⁷-AA²⁰⁸-AA²⁰⁹** (XXIV-12); *AA²⁰⁷-AA²⁰⁸-AA²⁰⁹** (XXIV-13); *AA²⁰⁸-AA²⁰⁹** (XXIV-14); wherein, for instance, said peptide of formulae (XXIV-1) may thus be selected from the group consisting of *AA^{III}-AA^{I}-AA^{I}-AA^{II}-AA^{VII}-AA^{XII}-AA^{XII}-AA^{XIII}**, *AA^{III}-AA^{I}-AA^{VI}-AA^{II}-AA^{VII}-AA^{XII}-AA^{XII}-AA^{XIII}**, *AA^{III}- AA^{I}-AA^{I}-AA^{II}-AA^{II}-AA^{XII}-AA^{XII}-AA^{XIII}**, *AA^{III}-AA^{I}-AA^{II}-AA^{II}-AA^{VII}-AA^{XII}-AA^{XII}-AA^{XIII}**, *AA^{III}-AA^{I}-AA^{II}-AA^{IV}-AA^{IV}-AA^{XII}-AA^{XII}-AA^{XIII}**, *AA^{II}-AA^{I}-AA^{II}-AA^{II}-AA^{II}-AA^{XII}-AA^{XII}-AA^{XIII}**, *AA^{III}-AA^{III}-AA^{II}-AA^{VII}-AA^{II}-AA^{XII}-AA^{XII}-AA^{XIII}**, *AA^{III}-AA^{I}-AA^{I}-AA^{II}-AA^{II}-AA^{XII}-AA^{XII}-AA^{XIII}**, *AA^{V}-AA^{V}-AA^{VII}-AA^{VII}-AA^{XII}-AA^{XII}-AA^{XIII}**, *AA^{VIII}-AA^{V}-AA^{VII}-AA^{II}-AA^{XII}-AA^{XII}-AA^{XIII}** and *AA^{V}-AA^{V}-AA^{VII}-AA^{II}-AA^{XII}-AA^{XII}-AA^{XIII}**

[0404] In one particular example, LINKER comprises a peptide of formula (XXIV), (XXIV-2) or (XXIV-4).

[0405] In one example, LINKER comprises (or is) a poly-(aliphatic amino acid) peptide such as poly-alanine peptide (A)ₙ, or a poly-glycine (G)ₙ, n being an integer comprised between 2 and 31, in particular between 2 to 25, more particularly between 2 and 20, such as A-A-A-A-A-A-A-A-A (SEQ ID NO: 13835), A-A-A-A-A-A-A (SEQ ID NO: 13836), A-A-A-A-A (SEQ ID NO: 13837), G-G-G-G-G-G-G-G-G (SEQ ID NO: 13838), G-G-G-G-G-G-G (SEQ ID NO: 13839) or G-G-G-G-G (SEQ ID NO: 13840).

[0406] In one particular example, LINKER comprises (or is) a peptide of general formulae (XXIV) to (XXIV-14), more particularly (XXIV), (XXIV-2) or (XXIV-4), and/or a poly-(aliphatic amino acid)ₙ peptide as defined herein.

[0407] For example, in certain embodiments, LINKER is a polysaccharide comprising 6 to 31 saccharides. In one particular example, LINKER is a polysaccharide comprising 6 to 25 saccharides. In one particular example, LINKER is a polysaccharide comprising 8 to 25 saccharides. In one most particular example, LINKER is a polysaccharide comprising 8 to 20 saccharides. Suitable monosaccharides include, but are not limited to, glucose (dextrose), fructose (levulose) and galactose. Monosaccharides are the building blocks of disaccharides (such as sucrose) and polysaccharides (such as celluloses, chitosans, ulvanes and starches). Further, each carbon atom that supports a hydroxyl group (except for the first and last) is chiral, giving rise to a number of isomeric forms all with the same chemical formula. A large number of biologically important modified monosaccharides exists e.g. amino sugars such as Galactosamine, Glucosamine, Sialic acid, N-Acetylglucosamine, and sulfosugars such as Sulfoquinovose. All of these monosaccharide and polysaccharide derivatives may be used as LINKER in the present invention.

[0408] For example, in certain embodiments, LINKER is a polynucleotide comprising 6 to 31 nucleotides. In one particular example, LINKER is a polynucleotide comprising 6 to 25 nucleotides. In one particular example, LINKER is a polynucleotide comprising 8 to 25 nucleotides. In one most particular example, LINKER is a polynucleotide comprising 8 to 20 nucleotides. Suitable nucleotides include adenine (A), guanine (G), thymine (T), cytosine (C), uracil (U) and derivatives, analogues and/or mimetic thereof.

[0409] For example, in certain embodiments, LINKER is a saturated or unsaturated hydrocarbon chain comprising between 16 and 60, between 16 and 45, or between 16 and 30 carbon atoms, wherein said hydrocarbon chain is optionally interrupted by one or more non-carbon atom, preferably between 1 and 16, between 1 and 12 or between 1 and 8 non-carbon atoms as appropriate, wherein said non-carbon atom is selected from the group consisting of —O—, —S—, —C(═O), —SO₂—, —N(Ri)(C═O)—, and —N(Ri)-, wherein Ri is selected from the group consisting of a hydrogen atom, a C1-C6 alkyl group and an aryl group, and wherein said hydrocarbon chain is non-substituted or substituted by at least one radical selected from the group consisting of a halogen, a monosaccharide, a poly(1-6)saccharide, a nucleotide, a poly(1-6)nucleotide, a C1-C10 alkyl group and an aryl group.

[0410] In one example, LINKER is a saturated or unsaturated hydrocarbon chain of at most 10 nanometres (nm) in length, preferably at most 144 nanometres (nm) in length, in particular at most 120 nm, 96 nm, 84 nm or 72 nm as determined using the standard «2D» procedure described above.

[0411] In one example, such saturated or unsaturated hydrocarbon chains include polyethylene glycol (PEG) or any one of its derivatives.

[0412] More particularly, LINKER is a octapeptide (8 amino acids). More particularly, LINKER is a nonapeptide (9 amino acids). More particularly, LINKER is a decapeptide (10 amino acids). More particularly, LINKER is a hendecapeptide (11 amino acids). More particularly, LINKER is a dodecapeptide (12 amino acids). More particularly, LINKER is a tridecapeptideo (13 amino acids). More particularly, LINKER is a tetradecapeptide (14 amino acids). More particularly, LINKER is a pentadecapeptide (15 amino acids). More particularly, LINKER is a hexadecapeptide (16 amino acids). More particularly, LINKER is a heptadecapeptide (17 amino acids). More particularly, LINKER is an octadecapeptide (18 amino acids). More particularly, LINKER is an enneadecapeptide (19 amino acids). More particularly, LINKER is an icosapeptide (20 amino acids).

[0413] In one particular example, LINKER comprises one or more of a peptide selected from the group consisting of DENEKVV (SEQ ID NO: 13841), DENKNVV (SEQ ID NO: 13842), DEYDKVV (SEQ ID NO: 13843), DDSSNVI (SEQ ID NO: 13851), DSSNNVI (SEQ ID NO: 13845), DDMGVPT (SEQ ID NO: 13846), DKGVVTY (SEQ ID NO: 13847), NDKQQII (SEQ ID NO: 13848), DAANNVV (SEQ ID NO: 13849), DSANNVV (SEQ ID NO: 13850), DDSSNVI (SEQ ID NO: 13851), DNGRVLL (SEQ ID NO: 13852), VGRKPKV (SEQ ID NO: 13853), IGKTPKI (SEQ ID NO: 13854), VGRTPKV (SEQ ID NO: 13855), RIKPHQGQH (SEQ ID NO: 13856), EYVRKKPKL (SEQ ID NO: 13857), EIVRKKPIF (SEQ ID NO: 13858), EYVRKKP (SEQ ID NO: 13859), EIVRKKP (SEQ ID NO: 13860), polyalanine (A₁₋₁₂) (preferably A₂₋₈) and polyglycine (G₁₋₁₂) (preferably G₂₋₈).

[0414] For example, in certain embodiments, to synthetise cyclic GFR-binding compounds of the present disclosure, the covalent bonds between e.g. LINKER, PEP(A), PEP(C) or PEP1 to PEP12, may be created through the chemical reaction between a free amine moiety e.g. of a N-terminal amino acid (—NH₂ or —NH₃X, X generally being a halide anion selected from the group consisting of F⁻, Cl⁻ and Br⁻), typically acting as a nucleophile, and an electrophile moiety of e.g. a C-terminal amino acid. Such an electrophile moiety includes, but is not limited to, alkyl halides (—CR₂—X), alcohols (—CR₂—OH), acid chlorides (—C(═O)X), esters, (—C(═O)OR), phosphate (—OP(OR)₃), phosphinate (—OP(OR)R₂), phosphonates (—OP(OR)₂R), phosphonite (—P(OR)₂R) or sulfonic esters (—SO₂OR). More particularly, this covalent bond is an amide bond (in particular a peptide bond) formed through conventional peptide synthesis using conventional coupling reagents as already defined herein.

[0415] For example, in certain embodiments, to synthetise cyclic GFR-binding compounds of the present disclosure, the covalent bonds between e.g. LINKER, PEP(A), PEP(C) or PEP1 to PEP12, may be created through the chemical reaction between a free carboxylic acid moiety e.g. of a C-terminal amino acid (—CO₂H or —CO₂X, X generally being an inorganic cation such as alkaline cations (e.g. Li⁺, Na⁺ or K⁺) or an organic cation such as ammonium cations), typically acting as an electrophile, and a nucleophile moiety of e.g. an N-terminal amino acid. Such a nucleophile moiety includes, but is not limited to, alcohols (—OH), amines (—NH₂), phosphines (—PR₃), thiols (—SH). More particularly, this covalent interaction is a peptide bond formed through conventional peptide synthesis using conventional coupling reagents as already defined herein.

[0416] Cyclisation of a cyclic GFR-binding compound of the present disclosure may be carried out as described above using conventional peptide bond formation procedures, click chemistry, formation of disulphide bonds, etc.

[0417] The present disclosure provides pharmaceutical associations, combinations and compositions, methods and uses for converting or recoding any neoplastic cell into a non-neoplastic cell (in particular, a functional and healthy cell) of any type. In some cases, the cell type of the converted or recoded non-neoplastic cell may be selected/chosen by e.g. a person providing the treatment to a subject.

[0418] In one example, said pharmaceutical association, combination or composition induces the conversion of a neoplastic cell into a physiologically functional and/or healthy cell of any cell lineage including, but not limited to, bone cell, chondrocytic cell, neuron cell, fibroblast, vascular cell, ligament cell, tendon cell, epithelial cell, retina photoreceptor cell, muscle cell, glandular cell, myoepithelial cell, subepithelial interstitial cell, smooth muscle cell, blood cell, gastrointestinal cell, adipocyte, Sertoli cells, Leydig cell, Germ cell and renal cell lineages. Such cells include any progenitor or precursor cells or any partially or fully differentiated cells of these lineages. More generally, the present disclosure includes the treatment of any neoplastic cell of any type and cell lineage using the associations, combinations, compositions, methods and uses as defined herein.

[0419] For example, in certain embodiments, a neoplastic cell of a bone tissue (i.e. a neoplastic cell from the bone cell lineage) has been, may be or will be the cause of the development of a neoplastic bone disease (e.g. bone cancer). Inducing the conversion of this neoplastic bone cell into a physiologically functional and/or healthy cell (any physiologically functional and/or healthy cell) of the bone cell lineage may protect a subject/patient carrying this cell from bone cancer. In some cases, it may be preferable and/or satisfying and/or more practical to induce the conversion of a neoplastic bone cell into a functional and/or healthy cell of a different cell lineage i.e. not a cell from a bone lineage, such as, for example, in certain embodiments, a cell from a chondrocytic cell lineage, a fibroblast lineage or a ligament/tendon cell lineage.

[0420] In one example, a neoplastic cell of a soft tissue such as a muscle, vascular, skin or kidney tissue (i.e. a neoplastic cell from the muscle, vascular, skin or kidney cell lineage, respectively) has been, may be or will be the cause of the development of a neoplastic muscle, vascular, skin or kidney disease (e.g. Rhabdomyosarcoma, Hemangiosarcoma, basal cell carcinoma or Squamous cell carcinoma, respectively). Inducing the conversion of any of these neoplastic cells into a physiologically functional and/or healthy cell (any physiologically functional and/or healthy cell) of the muscle, vascular, skin or kidney cell lineage, respectively, may protect a subject carrying any of these cells from the diseases mentioned above. In some cases, it may be preferable and/or satisfying and/or more practical to induce the conversion of, e.g. a neoplastic muscle, vascular, skin or kidney cell into a functional and/or healthy cell of a different cell lineage i.e. not a cell from a muscle, vascular, skin or kidney lineage, such as, for example, in certain embodiments, a cell from a bone cell lineage so that a medical practitioner such as a surgeon, may be able to surgically remove the newly converted bone cells more conveniently. The surgery may be carried out purely for aesthetic reasons and/or because of a discomfort and/or to avoid the possibility of e.g. infections, complications, etc.

[0421] For example, in certain embodiments, a neoplastic cell of an adipose tissue (i.e. a neoplastic cell from the adipocyte lineage) has been, may be or will be the cause of the development of a neoplastic adipose tissue disease (e.g. adipose tissue cancer or lipoma). Several treatment routes may be envisaged to induce the conversion of this neoplastic adipocyte into a physiologically functional and/or healthy cell and thus protect a subject/patient carrying this cell from a lipoma. In some cases, it may be preferable and/or satisfying and/or more practical to induce the conversion of the neoplastic adipocyte into a functional and/or healthy cell of a bone cell lineage. Once the treatment has been completed i.e. after the conversion of the neoplastic adipocyte into a non-neoplastic bone cell (e.g. an osteocyte) has taken place, surgical removal of the newly converted bone cells may be performed for e.g. aesthetic reasons and/or because of a discomfort and/or to avoid the possibility of e.g. infections, complications, etc. In other cases, it may be preferable and/or satisfying and/or more practical to induce the conversion of the neoplastic adipocyte into a functional and/or healthy cell of a muscle cell lineage. Because the conversion of the neoplastic adipocyte into a non-neoplastic muscle cell (e.g. a myocyte) does not yield hard tissues such as osteocytes, the patient would generally not feel any substantial discomfort and therefore, the surgical removal of the newly converted muscle cells may be avoided, although it may still be performed if the patient were to feel even the slight discomfort. The necessity of performing surgery following the presently defined recoding treatment would generally be left to the appreciation of the patient upon supervision of a medical practitioner.

[0422] The present disclosure thus provides methods to convert or recode a neoplastic cell of a specific tissue/cell type (e.g. bone, cartilage, neuron, prostate, ovary, muscle, skin, vascular, ligament, tendon, eye retina, kidney, head, neck, blood, gastrointestinal, lung and adipose tissues) into a non-neoplastic cell of any tissue/cell type (e.g. bone, cartilage, neuron, prostate, ovary, muscle, skin, vascular, ligament, tendon, eye retina and kidney).

Induction into a Cell of a Specific Cell Lineage

### Bone Cell Lineage

[0423] Certain embodiments of the invention are particularly useful for inducing the conversion of a neoplastic cell into a cell (any cell) of a bone cell lineage.

[0424] In certain embodiments useful for inducing the conversion of a neoplastic cell into a cell (any cell) of a bone cell lineage, PEP1 is selected from the group consisting of SAIS (SEQ ID NO: 13570), NAIS (SEQ ID NO: 13567), SATS (SEQ ID NO: 13571) and SPIS (SEQ ID NO: 13574).

[0425] In certain embodiments useful for inducing the conversion of a neoplastic cell into a cell (any cell) of a bone cell lineage, PEP3 is selected from the group consisting of VPT, APT, VPQ, VSQ and TQV.

[0426] In certain embodiments useful for inducing the conversion of a neoplastic cell into a cell (any cell) of a bone cell lineage, PEP5 is a peptide of general formula PEP3-AA¹¹-AA¹²; wherein PEP3 is selected from the group consisting of VPT, APT, VPQ, VSQ and TQV; wherein AA¹¹ is selected from the group consisting of E, K, Q, R, A, D, G and H, in particular E, K, Q, A and D; wherein AA¹² is selected from the group consisting of L, M, T, E, Q and H, in particular L. In one particular example, PEP5 is selected from the group consisting of VPTEL (SEQ ID NO: 13631), APTKL (SEQ ID NO: 13579), APTQL (SEQ ID NO: 13582), VPTKL (SEQ ID NO: 13633), VPQAL (SEQ ID NO: 13620), VSQDL (SEQ ID NO: 13639), VPQDL (SEQ ID NO: 13621) and TQVQL (SEQ ID NO: 13603).

[0427] In certain embodiments useful for inducing the conversion of a neoplastic cell into a cell (any cell) of a bone cell lineage, PEP7 is an amino acid or a peptide with between two and seven amino acids of general formula AA¹-AA²-AA³-AA⁴-AA⁵-AA⁶-AA⁷ (SEQ ID NO: 13816); wherein AA¹, AA², AA³, AA⁴, and AA⁵ are independently absent or AA^{I} as defined herein; wherein AA⁶ is absent or selected from the group consisting of S, T, C, E, Q, P and R, preferably C, S, T or R; wherein AA⁷ is absent or is selected from the group consisting of S, T, C, E, Q, P and R, preferably is selected from the group consisting of C, S and P; and wherein at least one of AA¹, AA², AA³, AA⁴, AA⁵, AA⁶ or AA⁷ is not absent. In one particular example, PEP7 is selected from the group consisting of KIPKAXX (SEQ ID NO: 13655), SIPKAXX (SEQ ID NO: 13660), HVTKPTX (SEQ ID NO: 13653), YVPKPXX (SEQ ID NO: 13664), TVPKPXX (SEQ ID NO: 13663), AVPKAXX (SEQ ID NO: 13649), KVGKAXX (SEQ ID NO: 13656), ASAAPXX (SEQ ID NO: 13647), ASASPXX (SEQ ID NO: 13648) and RNVQXRP (SEQ ID NO: 13658).

[0428] In certain embodiments useful for inducing the conversion of a neoplastic cell into a cell (any cell) of a bone cell lineage, PEP9 is a peptide of general formula AA¹-AA²-AA³-AA⁴-AA⁵-AA⁶-AA⁷-PEP5; wherein PEP5 is a peptide of formula PEP3-AA¹¹-AA¹²; wherein PEP3 is selected from the group consisting of VPT, APT, VPQ, VSQ and TQV; wherein AA¹¹ is selected from the group consisting of E, K, Q, R, A, D, G and H, in particular E, K, Q, A and D; wherein AA¹² is selected from the group consisting of L, M, T, E, Q and H, in particular L; wherein AA¹, AA², AA³, AA⁴, and AA⁵ are independently absent or AA^{I} as defined herein; wherein AA⁶ is absent or selected from the group consisting of S, T, C, E, Q, P and R, preferably C, S, T or R; wherein AA⁷ is selected from the group consisting of S, T, C, E, Q, P and R, preferably is selected from the group consisting of C, S and P. In one particular example, PEP9 is selected from the group consisting of KIPKAXXVPTEL (SEQ ID NO: 13745), SIPKAXXVPTEL (SEQ ID NO: 13773), HVTKPTXAPTKL (SEQ ID NO: 13721), YVPKPXXAPTKL (SEQ ID NO: 13793), TVPKPXXAPTQL (SEQ ID NO: 13785), AVPKAXXAPTKL (SEQ ID NO: 13689), KVGKAXXVPTKL (SEQ ID NO: 13753), ASAAPXXVPQAL (SEQ ID NO: 13678), ASASPXXVSQDL (SEQ ID NO: 13688), ASASPXXVPQDL (SEQ ID NO: 13686) and RNVQXRPTQVQL (SEQ ID NO: 13758).

[0429] In certain embodiments useful for inducing the conversion of a neoplastic cell into a cell (any cell) of a bone cell lineage, PEP12 is a peptide of general formula PEP1-AA¹⁷-PEP11; wherein AA¹⁷ is selected from the group consisting of G, A, V, L, I, P, F, M, W, T and S (in particular is selected from the group consisting of M, I, L, V and T); wherein PEP1 is selected from the group consisting of SAIS (SEQ ID NO: 13570), NAIS (SEQ ID NO: 13567), SATS (SEQ ID NO: 13571) and SPIS (SEQ ID NO: 13574).

[0430] In certain embodiments useful for inducing the conversion of a neoplastic cell into a cell (any cell) of a bone cell lineage, PEP11 is a peptide with 3 amino acids of general formula AA¹⁸-AA¹⁹-AA²⁰; wherein AA¹⁸ is selected from the group consisting of L, V, Q, A and R, in particular is L; wherein AA¹⁹ is selected from the group consisting of F, W, H and Y (in particular is an aromatic, polar amino acid such as Y); wherein AA²⁰ is selected from the group consisting of L, F, Y, K, I, V and M, in particular is selected from the group consisting of L, F, Y, and K. In one particular example, PEP11 is selected from the group consisting of LYL, LYF, LYY and LYK.

[0431] In certain embodiments useful for inducing the conversion of a neoplastic cell into a cell (any cell) of a bone cell lineage, PEP1 is selected from the group consisting of SAIS (SEQ ID NO: 13570), NAIS (SEQ ID NO: 13567), SATS (SEQ ID NO: 13571) and SPIS (SEQ ID NO: 13574); PEP11 is selected from the group consisting of LYL, LFF, LYF, LYY, LYK, LYI, LFI, LYV, VYY, QIM, AKV and RKI; and the pair PEP1:PEP11 is selected from the group consisting of SAIS (SEQ ID NO: 13570):LYL, NAIS (SEQ ID NO: 13567):LYF, SATS (SEQ ID NO: 13571):LYY and SPIS (SEQ ID NO: 13574):LYK.

[0432] The definitions of “PEP” pairs and triplets e.g. PEP3:PEP1, PEP5:PEP12, or PEP7:PEP5:PEP1, most particularly useful for inducing the conversion of a neoplastic cell into a cell (any cell) of a bone cell lineage, are as already defined herein to the extent that PEP1, PEP3, PEP5, PEP7, PEP9, PEP11 and PEP12 are particularly useful for these applications as defined in the present bone section.

[0433] In certain embodiments useful for inducing the conversion of a neoplastic cell into a cell (any cell) of a bone cell lineage, said GFR-binding compound is a synthetic molecule as defined herein in the definition section.

[0434] In certain embodiments useful for inducing the conversion of a neoplastic cell into a cell (any cell) of a bone cell lineage, said GFR-binding compound is a synthetic peptide, or a variant or analog thereof, or a peptidomimetic.

### Chondrocytic Cell Lineage

[0435] Certain embodiments of the invention are particularly useful for inducing the conversion of a neoplastic cell into a cell (any cell) of a chondrocytic cell lineage.

[0436] In certain embodiments useful for inducing the conversion of a neoplastic cell into a cell (any cell) of a chondrocytic cell lineage, PEP1 is selected from the group consisting of SAIS (SEQ ID NO: 13570), NAIS (SEQ ID NO: 13567), SPIS (SEQ ID NO: 13574), EPLP (SEQ ID NO: 13564) and EPLT (SEQ ID NO: 13565).

[0437] In certain embodiments useful for inducing the conversion of a neoplastic cell into a cell (any cell) of a chondrocytic cell lineage, PEP3 is selected from the group consisting of VPT, APT, VPQ and VSQ.

[0438] In certain embodiments useful for inducing the conversion of a neoplastic cell into a cell (any cell) of a chondrocytic cell lineage, PEP5 is a peptide of general formula PEP3-AA¹¹-AA¹²; wherein PEP3 is selected from the group consisting of VPT, APT, VPQ and VSQ; wherein AA¹¹ is selected from the group consisting of E, K, Q, R, A, D, G and H, in particular E, K, Q, R, A and D; wherein AA¹² is selected from the group consisting of L, M, T, E, Q and H, in particular is L. In one particular example, PEP5 is selected from the group consisting of VPTEL (SEQ ID NO: 13631), APTKL (SEQ ID NO: 13579), APTQL (SEQ ID NO: 13582), VPTRL (SEQ ID NO: 13637), VPQAL (SEQ ID NO: 13620), VSQDL (SEQ ID NO: 13639) and VPQDL (SEQ ID NO: 13621).

[0439] In certain embodiments useful for inducing the conversion of a neoplastic cell into a cell (any cell) of a chondrocytic cell lineage, PEP7 is an amino acid or a peptide with between two and seven amino acids of general formula AA¹-AA²-AA³-AA⁴-AA⁵-AA⁶-AA⁷ (SEQ ID NO: 13816); wherein AA¹, AA², AA³, AA⁴, and AA⁵ are independently absent or AA^{I} as defined herein; wherein AA⁶ is absent or selected from the group consisting of S, T, C, E, Q, P and R, preferably is S, C or T; wherein AA⁷ is absent or is selected from the group consisting of S, T, C, E, Q, P and R, preferably is S or C; and wherein at least one of AA¹, AA², AA³, AA⁴, AA⁵, AA⁶ or AA⁷ is not absent. In one particular example, PEP7 is selected from the group consisting of KIPKAXX (SEQ ID NO: 13655), SIPKAXX (SEQ ID NO: 13660), HVTKPTX (SEQ ID NO: 13653), YVPKPXX (SEQ ID NO: 13664), TVPKPXX (SEQ ID NO: 13663), STPPTXX (SEQ ID NO: 13662), ASAAPXX (SEQ ID NO: 13647) and ASASPXX (SEQ ID NO: 13648).

[0440] In certain embodiments useful for inducing the conversion of a neoplastic cell into a cell (any cell) of a chondrocytic cell lineage, PEP9 is a peptide of general formula AA¹-AA²-AA³-AA⁴-AA⁵-AA⁶-AA⁷-PEP5; wherein PEP5 is a peptide of formula PEP3-AA¹¹-AA¹²; wherein PEP3 is selected from the group consisting of VPT, APT, VPQ and VSQ; wherein AA¹¹ is selected from the group consisting of E, K, Q, R, A, D, G and H, in particular E, K, Q, R, A and D; wherein AA¹² is selected from the group consisting of L, M, T, E, Q and H, in particular is L; wherein AA¹, AA², AA³, AA⁴, and AA⁵ are independently absent or AA^{I} as defined herein; wherein AA⁶ is absent or selected from the group consisting of S, T, C, E, Q, P and R, preferably is S, C or T; wherein AA⁷ is selected from the group consisting of S, T, C, E, Q, P and R, preferably is S or C. In one particular example, PEP9 is selected from the group consisting of KIPKAXXVPTEL (SEQ ID NO: 13745), SIPKAXXVPTEL (SEQ ID NO: 13773), HVTKPTXAPTKL (SEQ ID NO: 13721), YVPKPXXAPTKL (SEQ ID NO: 13793), TVPKPXXAPTQL (SEQ ID NO: 13785), STPPTXXVPTRL (SEQ ID NO: 13783), ASAAPXXVPQAL (SEQ ID NO: 13678), ASASPXXVSQDL (SEQ ID NO: 13688) and ASASPXXVPQDL (SEQ ID NO: 13686).

[0441] In certain embodiments useful for inducing the conversion of a neoplastic cell into a cell (any cell) of a chondrocytic cell lineage, PEP12 is a peptide of general formula PEP1-AA¹⁷-PEP11; wherein AA¹⁷ is selected from the group consisting of G, A, V, L, I, P, F, M, W, T and S (in particular is selected from the group consisting of M, I, L, V and T); wherein PEP1 is selected from the group consisting of SAIS (SEQ ID NO: 13570), NAIS (SEQ ID NO: 13567), SPIS (SEQ ID NO: 13574), EPLP (SEQ ID NO: 13564) and EPLT (SEQ ID NO: 13565).

[0442] In certain embodiments useful for inducing the conversion of a neoplastic cell into a cell (any cell) of a chondrocytic cell lineage, PEP11 is a peptide with 3 amino acids of general formula AA¹⁸-AA¹⁹-AA²⁰; wherein AA¹⁸ is selected from the group consisting of L, V, Q, A and R, in particular is L or V; wherein AA¹⁹ is selected from the group consisting of F, W, H and Y, in particular is Y or F; wherein AA²⁰ is selected from the group consisting of L, F, Y and I. In one particular example, PEP11 is selected from the group consisting of LYL, LYF, LFI, VYY and LYY.

[0443] In certain embodiments useful for inducing the conversion of a neoplastic cell into a cell (any cell) of a chondrocytic cell lineage, PEP1 is selected from the group consisting of SAIS (SEQ ID NO: 13570), NAIS (SEQ ID NO: 13567), SPIS (SEQ ID NO: 13574), EPLP (SEQ ID NO: 13564) and EPLT (SEQ ID NO: 13565); PEP11 is selected from the group consisting of LYL, LYF, LFI, VYY and LYY; and the pair PEP1:PEP11 is selected from the group consisting of SAIS (SEQ ID NO: 13570):LYL, NAIS (SEQ ID NO: 13567):LYF, SPIS (SEQ ID NO: 13574):LFI, EPLP (SEQ ID NO: 13564):VYY and EPLT (SEQ ID NO: 13565):LYY.

[0444] The definitions of “PEP” pairs and triplets e.g. PEP3:PEP1, PEP5:PEP12, or PEP7:PEP5:PEP1, most particularly useful for inducing the conversion of a neoplastic cell into a cell (any cell) of a chondrocytic cell lineage, are as already defined herein to the extent that PEP1, PEP3, PEP5, PEP7, PEP9, PEP11 and PEP12 are particularly useful for these applications as defined in the present cartilage section.

[0445] In certain embodiments useful for inducing the conversion of a neoplastic cell into a cell (any cell) of a chondrocytic cell lineage, said GFR-binding compound is a synthetic molecule as defined herein in the definition section.

[0446] In certain embodiments useful for inducing the conversion of a neoplastic cell into a cell (any cell) of a chondrocytic cell lineage, said GFR-binding compound is a synthetic peptide, or a variant or analog thereof, or a peptidomimetic.

### Vascular Cell Lineage

[0447] Certain embodiments of the invention are particularly useful for inducing the conversion of a neoplastic cell into a cell (any cell) of a vascular cell lineage.

[0448] In other embodiments useful for inducing the conversion of a neoplastic cell into a cell (any cell) of a vascular cell lineage, PEP1 is selected from the group consisting of SNIT (SEQ ID NO: 13572), RPVQ (SEQ ID NO: 13568) and RSVK (SEQ ID NO: 13569).

[0449] In other embodiments useful for inducing the conversion of a neoplastic cell into a cell (any cell) of a vascular cell lineage, PEP3 is selected from the group consisting of VPT, SRV and TQV.

[0450] In other embodiments useful for inducing the conversion of a neoplastic cell into a cell (any cell) of a vascular cell lineage, PEP5 is a peptide of general formula PEP3-AA¹¹-AA¹²; wherein PEP3 is selected from the group consisting of VPT, SRV and TQV; wherein AA¹¹ is selected from the group consisting of E, K, Q, R, A, D, G and H, in particular is E, G, H and Q; wherein AA¹² is selected from the group consisting of L, M, T, E, Q and H, in particular is selected from the group consisting of E, Q, H and L. In one particular example, PEP5 is selected from the group consisting of VPTGQ (SEQ ID NO: 13632), VPTEE (SEQ ID NO: 13630), SRVHH (SEQ ID NO: 13592) and TQVQL (SEQ ID NO: 13603).

[0451] In other embodiments useful for inducing the conversion of a neoplastic cell into a cell (any cell) of a vascular cell lineage, PEP7 is an amino acid or a peptide with between two and seven amino acids of general formula AA¹-AA²-AA³-AA⁴-AA⁵-AA⁶-AA⁷ (SEQ ID NO: 13816); wherein AA¹, AA², AA³, AA⁴, and AA⁵ are independently absent or AA^{I} as defined herein; wherein AA⁶ is absent or selected from the group consisting of S, T, C, E, Q, P and R, preferably is selected from the group consisting of E, Q and R; wherein AA⁷ is absent or is selected from the group consisting of S, T, C, E, Q, P and R, preferably is selected from the group consisting of S, C and P; and wherein at least one of AA¹, AA², AA³, AA⁴, AA⁵, AA⁶ or AA⁷ is not absent. In one particular example, PEP7 is selected from the group consisting of NDEGLEX (SEQ ID NO: 13657), SSVKXQP (SEQ ID NO: 13661) and RNVQXRP (SEQ ID NO: 13658).

[0452] In other embodiments useful for inducing the conversion of a neoplastic cell into a cell (any cell) of a vascular cell lineage, PEP9 is a peptide of general formula AA¹-AA²-AA³-AA⁴-AA⁵-AA⁶-AA⁷-PEP5; wherein PEP5 is a peptide of formula PEP3-AA¹¹-AA¹²; wherein PEP3 is selected from the group consisting of VPT, SRV and TQV; wherein AA¹¹ is selected from the group consisting of E, K, Q, R, A, D, G and H, in particular is E, G, H and Q; wherein AA¹² is selected from the group consisting of L, M, T, E, Q and H, in particular is selected from the group consisting of E, Q, H and L; wherein AA¹, AA², AA³, AA⁴, and AA⁵ are independently absent or AA^{I} as defined herein; wherein AA⁶ is absent or selected from the group consisting of S, T, C, E, Q, P and R, preferably is selected from the group consisting of E, Q and R; wherein AA⁷ is selected from the group consisting of S, T, C, E, Q, P and R, preferably is selected from the group consisting of S, C and P. In one particular example, PEP9 is selected from the group consisting of NDEGLEXVPTEE (SEQ ID NO: 13755), NDEGLEXVPTGQ (SEQ ID NO: 13756), SSVKXQPSRVHH (SEQ ID NO: 13775) and RNVQXRPTQVQL (SEQ ID NO: 13758).

[0453] In other embodiments useful for inducing the conversion of a neoplastic cell into a cell (any cell) of a vascular cell lineage, PEP12 is a peptide of general formula PEP1-AA¹⁷-PEP11; wherein AA¹⁷ is selected from the group consisting of G, A, V, L, I, P, F, M, W, T and S (in particular is selected from the group consisting of M, I, L, V and T); wherein PEP1 is selected from the group consisting of SNIT (SEQ ID NO: 13572), RPVQ (SEQ ID NO: 13568) and RSVK (SEQ ID NO: 13569).

[0454] In other embodiments useful for inducing the conversion of a neoplastic cell into a cell (any cell) of a vascular cell lineage, PEP11 is a peptide with 3 amino acids of general formula AA¹⁸-AA¹⁹-AA²⁰; wherein AA¹⁸ is selected from the group consisting of L, V, Q, A and R, in particular is selected from the group consisting of Q, A and R; wherein AA¹⁹ is selected from the group consisting of F, W, H, Y, I and K, in particular is I or K; wherein AA²⁰ is selected from the group consisting of L, F, Y, K, I, V and M, in particular is selected from the group consisting of M, V and I. In one particular example, PEP11 is selected from the group consisting of QIM, AKV and RKI.

[0455] In other embodiments useful for inducing the conversion of a neoplastic cell into a cell (any cell) of a vascular cell lineage, PEP1 is selected from the group consisting of SNIT (SEQ ID NO: 13572), RPVQ (SEQ ID NO: 13568) and RSVK (SEQ ID NO: 13569); PEP11 is selected from the group consisting of QIM, AKV and RKI; and the pair PEP1:PEP11 is selected from the group consisting of SNIT (SEQ ID NO: 13572):QIM, RSVK (SEQ ID NO: 13569):KEVQV and RPVQ (SEQ ID NO: 13568):KKATV.

[0456] The definitions of “PEP” pairs and triplets e.g. PEP3:PEP1, PEP5:PEP12, or PEP7:PEP5:PEP1, most particularly useful for inducing the conversion of a neoplastic cell into a cell (any cell) of a vascular cell lineage, are as already defined herein to the extent that PEP1, PEP3, PEP5, PEP7, PEP9, PEP11 and PEP12 are particularly useful for these applications as defined in the present vascular tissue section.

[0457] In other embodiments useful for inducing the conversion of a neoplastic cell into a cell (any cell) of a vascular cell lineage, said GFR-binding compound is a synthetic molecule as defined herein in the definition section.

[0458] In other embodiments useful for inducing the conversion of a neoplastic cell into a cell (any cell) of a vascular cell lineage, said GFR-binding compound is a synthetic peptide, or a variant or analog thereof, or a peptidomimetic.

### Neuron Lineage

[0459] Certain embodiments of the invention are particularly useful for inducing the conversion of a neoplastic cell into a cell (any cell) of a neuron lineage.

[0460] In certain embodiments useful for inducing the conversion of a neoplastic cell into a cell (any cell) of a neuron lineage, PEP1 is selected from the group consisting of NAIS (SEQ ID NO: 13567), SPIS (SEQ ID NO: 13574) and EPIS (SEQ ID NO: 13563).

[0461] In certain embodiments useful for inducing the conversion of a neoplastic cell into a cell (any cell) of a neuron lineage, PEP3 is selected from the group consisting of VPT, APT, VPA, VPQ and VSQ.

[0462] In certain embodiments useful for inducing the conversion of a neoplastic cell into a cell (any cell) of a neuron lineage, PEP5 is a peptide of general formula PEP3-AA¹¹-AA¹²; wherein PEP3 is selected from the group consisting of VPT, APT, VPA, VPQ and VSQ; wherein AA¹¹ is selected from the group consisting of E, K, Q, R, A, D, G and H, in particular E, K, Q, R, A and D; wherein AA¹² is selected from the group consisting of L, M, T, E, Q and H, in particular L. In one particular example, PEP5 is selected from the group consisting of VPTEL (SEQ ID NO: 13631), APTKL (SEQ ID NO: 13579), APTQL (SEQ ID NO: 13582), VPTKL (SEQ ID NO: 13633), VPARL (SEQ ID NO: 13611), VPQAL (SEQ ID NO: 13620), VSQDL (SEQ ID NO: 13639) and VPQDL (SEQ ID NO: 13621).

[0463] In certain embodiments useful for inducing the conversion of a neoplastic cell into a cell (any cell) of a neuron lineage, PEP7 is an amino acid or a peptide with between two and seven amino acids of general formula AA¹-AA²-AA³-AA⁴-AA⁵-AA⁶-AA⁷ (SEQ ID NO: 13816); wherein AA¹, AA², AA³, AA⁴, and AA⁵ are independently absent or AA^{I} as defined herein; wherein AA⁶ is absent or selected from the group consisting of S, T, C, E, Q, P and R, preferably S or C; wherein AA⁷ is absent or is selected from the group consisting of S, T, C, E, Q, P and R, preferably is S or C; and wherein at least one of AA¹, AA², AA³, AA⁴, AA⁵, AA⁶ or AA⁷ is not absent. In one particular example, PEP7 is selected from the group consisting of KIPKAXX (SEQ ID NO: 13655), SIPKAXX (SEQ ID NO: 13660), HVTKPTX (SEQ ID NO: 13653), YVPKPXX (SEQ ID NO: 13664), TVPKPXX (SEQ ID NO: 13663), AVPKAXX (SEQ ID NO: 13649), KVGKAXX (SEQ ID NO: 13656), ASAAPXX (SEQ ID NO: 13647), ASASPXX (SEQ ID NO: 13648) and RNVQXRP (SEQ ID NO: 13658).

[0464] In certain embodiments useful for inducing the conversion of a neoplastic cell into a cell (any cell) of a neuron lineage, PEP9 is a peptide of general formula AA¹-AA²-AA³-AA⁴-AA⁵-AA⁶-AA⁷-PEP5; wherein PEP5 is a peptide of formula PEP3-AA¹¹-AA¹²; wherein PEP3 is selected from the group consisting of VPT, APT, VPA, VPQ and VSQ; wherein AA¹¹ is selected from the group consisting of E, K, Q, R, A, D, G and H, in particular E, K, Q, R, A and D; wherein AA¹² is selected from the group consisting of L, M, T, E, Q and H, in particular L; wherein AA¹, AA², AA³, AA⁴, and AA⁵ are independently absent or AA^{I} as defined herein; wherein AA⁶ is absent or selected from the group consisting of S, T, C, E, Q, P and R, preferably S or C; wherein AA⁷ is selected from the group consisting of S, T, C, E, Q, P and R, preferably is S or C. In one particular example, PEP9 is selected from the group consisting of KIPKAXXVPTEL (SEQ ID NO: 13745), SIPKAXXVPTEL (SEQ ID NO: 13773), HVTKPTXAPTKL (SEQ ID NO: 13721), YVPKPXXAPTKL (SEQ ID NO: 13793), TVPKPXXAPTQL (SEQ ID NO: 13785), AVPKAXXAPTKL (SEQ ID NO: 13689), KVGKAXXVPTKL (SEQ ID NO: 13753), ASAAPXXVPQAL (SEQ ID NO: 13678), ASASPXXVSQDL (SEQ ID NO: 13688), ASASPXXVPQDL (SEQ ID NO: 13686) and RNVQXRPTQVQL (SEQ ID NO: 13758).

[0465] In certain embodiments useful for inducing the conversion of a neoplastic cell into a cell (any cell) of a neuron lineage, PEP12 is a peptide of general formula PEP1-AA¹⁷-PEP11; wherein AA¹⁷ is selected from the group consisting of G, A, V, L, I, P, F, M, W, T and S (in particular is selected from the group consisting of M, I, L, V and T); wherein PEP1 is selected from the group consisting of NAIS (SEQ ID NO: 13567), SPIS (SEQ ID NO: 13574) and EPIS (SEQ ID NO: 13563).

[0466] In certain embodiments useful for inducing the conversion of a neoplastic cell into a cell (any cell) of a neuron lineage, PEP11 is a peptide with 3 amino acids of general formula AA¹⁸-AA¹⁹-AA²⁰; wherein AA¹⁸ is selected from the group consisting of L, V, Q, A and R, in particular is L; wherein AA¹⁹ is selected from the group consisting of F, W, H and Y (in particular is an aromatic, polar amino acid such as Y); wherein AA²⁰ is selected from the group consisting of L, F, Y, K, I, V and M, in particular is selected from the group consisting of L, F, I, and K. In one particular example, PEP11 is selected from the group consisting of LYL, LYF, LYI and LYK.

[0467] In certain embodiments useful for inducing the conversion of a neoplastic cell into a cell (any cell) of a neuron lineage, PEP1 is selected from the group consisting of NAIS (SEQ ID NO: 13567), SPIS (SEQ ID NO: 13574) and EPIS (SEQ ID NO: 13563); PEP11 is selected from the group consisting of LYF, LYK, LYL and LYI; and the pair PEP1:PEP11 is selected from the group consisting of NAIS (SEQ ID NO: 13567):LYF, SPIS (SEQ ID NO: 13574):LYK, EPIS (SEQ ID NO: 13563):LYL and SPIS (SEQ ID NO: 13574):LYI.

[0468] The definitions of “PEP” pairs and triplets e.g. PEP3:PEP1, PEP5:PEP12, or PEP7:PEP5:PEP1, most particularly useful for inducing the conversion of a neoplastic cell into a cell (any cell) of a neuron lineage, are as already defined herein to the extent that PEP1, PEP3, PEP5, PEP7, PEP9, PEP11 and PEP12 are particularly useful for these applications as defined in the present section.

[0469] In certain embodiments useful for inducing the conversion of a neoplastic cell into a cell (any cell) of a neuron lineage, said GFR-binding compound is a synthetic molecule as defined herein in the definition section.

[0470] In certain embodiments useful for inducing the conversion of a neoplastic cell into a cell (any cell) of a neuron lineage, said GFR-binding compound is a synthetic peptide, or a variant or analog thereof, or a peptidomimetic.

### Eye Retina Cell Lineage

[0471] Certain embodiments of the invention are particularly useful for inducing the conversion of a neoplastic cell into a cell (any cell) of an eye retina cell lineage.

[0472] In certain embodiments useful for inducing the conversion of a neoplastic cell into a cell (any cell) of an eye retina cell lineage, PEP1 is SPIN (SEQ ID NO: 13573).

[0473] In certain embodiments useful for inducing the conversion of a neoplastic cell into a cell (any cell) of an eye retina cell lineage, PEP3 is selected from the group consisting of VPT, APT, TPT, VPA and APV.

[0474] In certain embodiments useful for inducing the conversion of a neoplastic cell into a cell (any cell) of an eye retina cell lineage, PEP5 is a peptide of general formula PEP3-AA¹¹-AA¹²; wherein PEP3 is selected from the group consisting of VPT, APT, TPT, VPA and APV; wherein AA¹¹ is selected from the group consisting of E, K, Q, R, A, D, G and H, in particular is E, K, Q and R; wherein AA¹² is selected from the group consisting of L, M, T, E, Q and H, in particular is L, M or T. In one particular example, PEP5 is selected from the group consisting of VPTEL (SEQ ID NO: 13631), APTKL (SEQ ID NO: 13579), APTQL (SEQ ID NO: 13582), VPTKL (SEQ ID NO: 13633), TPTKM (SEQ ID NO: 13598), VPARL (SEQ ID NO: 13611), VPTRL (SEQ ID NO: 13637) and APVKT (SEQ ID NO: 13589).

[0475] In certain embodiments useful for inducing the conversion of a neoplastic cell into a cell (any cell) of an eye retina cell lineage, PEP7 is an amino acid or a peptide with between two and seven amino acids of general formula AA¹-AA²-AA³-AA⁴-AA⁵-AA⁶-AA⁷ (SEQ ID NO: 13816); wherein AA¹, AA², AA³, AA⁴, and AA⁵ are independently absent or AA^{I} as defined herein; wherein AA⁶ is absent or selected from the group consisting of S, T, C, E, Q, P and R, preferably is S or C; wherein AA⁷ is absent or is selected from the group consisting of S, T, C, E, Q, P and R, preferably is S or C; and wherein at least one of AA¹, AA², AA³, AA⁴, AA⁵, AA⁶ or AA⁷ is not absent. In one particular example, PEP7 is selected from the group consisting of KIPKAXX (SEQ ID NO: 13655), SIPKAXX (SEQ ID NO: 13660), HVTKPTX (SEQ ID NO: 13653), YVPKPXX (SEQ ID NO: 13664), TVPKPXX (SEQ ID NO: 13663), AVPKAXX (SEQ ID NO: 13649), KVGKAXX (SEQ ID NO: 13656), KASKAXX (SEQ ID NO: 13654), GSAGPXX (SEQ ID NO: 13651), AAPAXXS, STPPTXX (SEQ ID NO: 13662), HVPKPXX (SEQ ID NO: 13652) and RVPSTXX (SEQ ID NO: 13659).

[0476] In certain embodiments useful for inducing the conversion of a neoplastic cell into a cell (any cell) of an eye retina cell lineage, PEP9 is a peptide of general formula AA¹-AA²-AA³-AA⁴-AA⁵-AA⁶-AA⁷-PEP5; wherein PEP5 is a peptide of formula PEP3-AA¹¹-AA¹²; wherein PEP3 is selected from the group consisting of VPT, APT, TPT, VPA and APV; wherein AA¹¹ is selected from the group consisting of E, K, Q, R, A, D, G and H, in particular is E, K, Q and R; wherein AA¹² is selected from the group consisting of L, M, T, E, Q and H, in particular is L, M or T; wherein AA¹, AA², AA³, AA⁴, and AA⁵ are independently absent or AA^{I} as defined herein; wherein AA⁶ is absent or selected from the group consisting of S, T, C, E, Q, P and R, preferably is S or C; wherein AA⁷ is selected from the group consisting of S, T, C, E, Q, P and R, preferably is S or C. In one particular example, PEP9 is selected from the group consisting of KIPKAXXVPTEL (SEQ ID NO: 13745), SIPKAXXVPTEL (SEQ ID NO: 13773), HVTKPTXAPTKL (SEQ ID NO: 13721), YVPKPXXAPTKL (SEQ ID NO: 13793), TVPKPXXAPTQL (SEQ ID NO: 13785), AVPKAXXAPTKL (SEQ ID NO: 13689), KVGKAXXVPTKL (SEQ ID NO: 13753), KASKAXXVPTKL (SEQ ID NO: 13737), GSAGPXXTPTKL, AAPASXXVPARL (SEQ ID NO: 13668), STPPTXXVPTRL (SEQ ID NO: 13783), HVPKPXXAPTKL (SEQ ID NO: 13713) and RVPSTXXAPVKT (SEQ ID NO: 13760).

[0477] In certain embodiments useful for inducing the conversion of a neoplastic cell into a cell (any cell) of an eye retina cell lineage, PEP12 is a peptide of general formula PEP1-AA¹⁷-PEP11; wherein AA¹⁷ is selected from the group consisting of G, A, V, L, I, P, F, M, W, T and S (in particular is selected from the group consisting of M, I, L, V and T); wherein PEP1 is SPIN (SEQ ID NO: 13573).

[0478] In certain embodiments useful for inducing the conversion of a neoplastic cell into a cell (any cell) of an eye retina cell lineage, PEP11 is a peptide with 3 amino acids of general formula AA¹⁸-AA¹⁹-AA²⁰; wherein AA¹⁸ is selected from the group consisting of L, V, Q, A and R, in particular is L; wherein AA¹⁹ is selected from the group consisting of F, W, H and Y, in particular is Y or F; wherein AA²⁰ is selected from the group consisting of L, F, Y, K, I, V and M, in particular is selected from the group consisting of L, F, Y, K, I and V. In one particular example, PEP11 is LYF.

[0479] In certain embodiments useful for inducing the conversion of a neoplastic cell into a cell (any cell) of an eye retina cell lineage, PEP1 is SPIN (SEQ ID NO: 13573) and PEP11 is LYF.

[0480] The definitions of “PEP” pairs and triplets e.g. PEP3:PEP1, PEP5:PEP12, or PEP7:PEP5:PEP1, most particularly useful for inducing the conversion of a neoplastic cell into a cell (any cell) of an eye retina cell lineage, are as already defined herein to the extent that PEP1, PEP3, PEP5, PEP7, PEP9, PEP11 and PEP12 are particularly useful for these applications as defined in the present eye retina section.

[0481] In certain embodiments useful for inducing the conversion of a neoplastic cell into a cell (any cell) of an eye retina cell lineage, said GFR-binding compound is a synthetic molecule as defined herein in the definition section.

[0482] In certain embodiments useful for inducing the conversion of a neoplastic cell into a cell (any cell) of an eye retina cell lineage, said GFR-binding compound is a synthetic peptide, or a variant or analog thereof, or a peptidomimetic.

### Renal Cell Lineage

[0483] Certain embodiments of the invention are particularly useful for inducing the conversion of a neoplastic cell into a cell (any cell) of a renal cell lineage.

[0484] In certain embodiments useful for inducing the conversion of a neoplastic cell into a cell (any cell) of a renal cell lineage, PEP1 is SPIN (SEQ ID NO: 13573).

[0485] In certain embodiments useful for inducing the conversion of a neoplastic cell into a cell (any cell) of a renal cell lineage, PEP3 is selected from the group consisting of VPT, APT, TPT, VPA and APV.

[0486] In certain embodiments useful for inducing the conversion of a neoplastic cell into a cell (any cell) of a renal cell lineage, PEP5 is a peptide of general formula PEP3-AA¹¹-AA¹²; wherein PEP3 is selected from the group consisting of VPT, APT, TPT, VPA and APV; wherein AA¹¹ is selected from the group consisting of E, K, Q, R, A, D, G and H, in particular is E, K, Q and R; wherein AA¹² is selected from the group consisting of L, M, T, E, Q and H, in particular is L, M or T. In one particular example, PEP5 is selected from the group consisting of VPTEL (SEQ ID NO: 13631), APTKL (SEQ ID NO: 13579), APTQL (SEQ ID NO: 13582), VPTKL (SEQ ID NO: 13633), TPTKM (SEQ ID NO: 13598), VPARL (SEQ ID NO: 13611), VPTRL (SEQ ID NO: 13637) and APVKT (SEQ ID NO: 13589).

[0487] In certain embodiments useful for inducing the conversion of a neoplastic cell into a cell (any cell) of a renal cell lineage, PEP7 is an amino acid or a peptide with between two and seven amino acids of general formula AA¹-AA²-AA³-AA⁴-AA⁵-AA⁶-AA⁷ (SEQ ID NO: 13816); wherein AA¹, AA², AA³, AA⁴, and AA⁵ are independently absent or AA^{I} as defined herein; wherein AA⁶ is absent or selected from the group consisting of S, T, C, E, Q, P and R, preferably is S or C; wherein AA⁷ is absent or is selected from the group consisting of S, T, C, E, Q, P and R, preferably is S or C; and wherein at least one of AA¹, AA², AA³, AA⁴, AA⁵, AA⁶ or AA⁷ is not absent. In one particular example, PEP7 is selected from the group consisting of KIPKAXX (SEQ ID NO: 13655), SIPKAXX (SEQ ID NO: 13660), HVTKPTX (SEQ ID NO: 13653), YVPKPXX (SEQ ID NO: 13664), TVPKPXX (SEQ ID NO: 13663), AVPKAXX (SEQ ID NO: 13649), KVGKAXX (SEQ ID NO: 13656), KASKAXX (SEQ ID NO: 13654), GSAGPXX (SEQ ID NO: 13651), AAPAXXS, STPPTXX (SEQ ID NO: 13662), HVPKPXX (SEQ ID NO: 13652) and RVPSTXX (SEQ ID NO: 13659).

[0488] In certain embodiments useful for inducing the conversion of a neoplastic cell into a cell (any cell) of a renal cell lineage, PEP9 is a peptide of general formula AA¹-AA²-AA³-AA⁴-AA⁵-AA⁶-AA⁷-PEP5; wherein PEP5 is a peptide of formula PEP3-AA¹¹-AA¹²; wherein PEP3 is selected from the group consisting of VPT, APT, TPT, VPA and APV; wherein AA¹¹ is selected from the group consisting of E, K, Q, R, A, D, G and H, in particular is E, K, Q and R; wherein AA¹² is selected from the group consisting of L, M, T, E, Q and H, in particular is L, M or T; wherein AA¹, AA², AA³, AA⁴, and AA⁵ are independently absent or AA^{I} as defined herein; wherein AA⁶ is absent or selected from the group consisting of S, T, C, E, Q, P and R, preferably is S or C; wherein AA⁷ is selected from the group consisting of S, T, C, E, Q, P and R, preferably is S or C. In one particular example, PEP9 is selected from the group consisting of KIPKAXXVPTEL (SEQ ID NO: 13745), SIPKAXXVPTEL (SEQ ID NO: 13773), HVTKPTXAPTKL (SEQ ID NO: 13721), YVPKPXXAPTKL (SEQ ID NO: 13793), TVPKPXXAPTQL (SEQ ID NO: 13785), AVPKAXXAPTKL (SEQ ID NO: 13689), KVGKAXXVPTKL (SEQ ID NO: 13753), KASKAXXVPTKL (SEQ ID NO: 13737), GSAGPXXTPTKL, AAPASXXVPARL (SEQ ID NO: 13668), STPPTXXVPTRL (SEQ ID NO: 13783), HVPKPXXAPTKL (SEQ ID NO: 13713) and RVPSTXXAPVKT (SEQ ID NO: 13760).

[0489] In certain embodiments useful for inducing the conversion of a neoplastic cell into a cell (any cell) of a renal cell lineage, PEP12 is a peptide of general formula PEP1-AA¹⁷-PEP11; wherein AA¹⁷ is selected from the group consisting of G, A, V, L, I, P, F, M, W, T and S (in particular is selected from the group consisting of M, I, L, V and T); wherein PEP1 is SPIN (SEQ ID NO: 13573).

[0490] In certain embodiments useful for inducing the conversion of a neoplastic cell into a cell (any cell) of a renal cell lineage, PEP11 is a peptide with 3 amino acids of general formula AA¹⁸-AA¹⁹-AA²⁰; wherein AA¹⁸ is selected from the group consisting of L, V, Q, A and R, in particular is L; wherein AA¹⁹ is selected from the group consisting of F, W, H and Y, in particular is Y or F; wherein AA²⁰ is selected from the group consisting of L, F, Y, K, I, V and M, in particular is selected from the group consisting of L, F, Y, K, I and V. In one particular example, PEP11 is LYF.

[0491] In certain embodiments useful for inducing the conversion of a neoplastic cell into a cell (any cell) of a renal cell lineage, PEP1 is SPIN (SEQ ID NO: 13573) and PEP11 is LYF.

[0492] The definitions of “PEP” pairs and triplets e.g. PEP3:PEP1, PEP5:PEP12, or PEP7:PEP5:PEP1, most particularly useful for inducing the conversion of a neoplastic cell into a cell (any cell) of a renal cell lineage, are as already defined herein to the extent that PEP1, PEP3, PEP5, PEP7, PEP9, PEP11 and PEP12 are particularly useful for these applications as defined in the present renal tissue section.

[0493] In certain embodiments useful for inducing the conversion of a neoplastic cell into a cell (any cell) of a renal cell lineage, said GFR-binding compound is a synthetic molecule as defined herein in the definition section.

[0494] In certain embodiments useful for inducing the conversion of a neoplastic cell into a cell (any cell) of a renal cell lineage, said GFR-binding compound is a synthetic peptide, or a variant or analog thereof, or a peptidomimetic.

### Ligament and Tendon Cell Lineage

[0495] Certain embodiments of the invention are particularly useful for inducing the conversion of a neoplastic cell into a cell (any cell) of the ligament and tendon cell lineage.

[0496] In certain embodiments useful for inducing the conversion of a neoplastic cell into a cell (any cell) of the ligament and tendon cell lineage, PEP1 is selected from the group consisting of NAIS (SEQ ID NO: 13567), SPIS (SEQ ID NO: 13574), EPLP (SEQ ID NO: 13564) and EPLT (SEQ ID NO: 13565).

[0497] In certain embodiments useful for inducing the conversion of a neoplastic cell into a cell (any cell) of the ligament and tendon cell lineage, PEP3 is selected from the group consisting of VPT, APT, VPQ and VSQ.

[0498] In certain embodiments useful for inducing the conversion of a neoplastic cell into a cell (any cell) of the ligament and tendon cell lineage, PEP5 is a peptide of general formula PEP3-AA¹¹-AA¹²; wherein PEP3 is selected from the group consisting of VPT, APT, VPQ and VSQ; wherein AA¹¹ is selected from the group consisting of E, K, Q, R, A, D, G and H, in particular is E, K, Q, R, A and D; wherein AA¹² is selected from the group consisting of L, M, T, E, Q and H, in particular is L. In one particular example, PEP5 is selected from the group consisting of VPTEL (SEQ ID NO: 13631), APTKL (SEQ ID NO: 13579), APTQL (SEQ ID NO: 13582), VPTRL (SEQ ID NO: 13637), VPQAL (SEQ ID NO: 13620), VSQDL (SEQ ID NO: 13639) and VPQDL (SEQ ID NO: 13621).

[0499] In certain embodiments useful for inducing the conversion of a neoplastic cell into a cell (any cell) of the ligament and tendon cell lineage, PEP7 is an amino acid or a peptide with between two and seven amino acids of general formula AA¹-AA²-AA³-AA⁴-AA⁵-AA⁶-AA⁷ (SEQ ID NO: 13816); wherein AA¹, AA², AA³, AA⁴, and AA⁵ are independently absent or AA^{I} as defined herein; wherein AA⁶ is absent or selected from the group consisting of S, T, C, E, Q, P and R, preferably is selected from the group consisting of T, S and C; wherein AA⁷ is absent or is selected from the group consisting of S, T, C, E, Q, P and R, preferably S or C; and wherein at least one of AA¹, AA², AA³, AA⁴, AA⁵, AA⁶ or AA⁷ is not absent. In one particular example, PEP7 is selected from the group consisting of KIPKAXX (SEQ ID NO: 13655), SIPKAXX (SEQ ID NO: 13660), HVTKPTX (SEQ ID NO: 13653), YVPKPXX (SEQ ID NO: 13664), TVPKPXX (SEQ ID NO: 13663), STPPTXX (SEQ ID NO: 13662), ASAAPXX (SEQ ID NO: 13647) and ASASPXX (SEQ ID NO: 13648).

[0500] In certain embodiments useful for inducing the conversion of a neoplastic cell into a cell (any cell) of the ligament and tendon cell lineage, PEP9 is a peptide of general formula AA¹-AA²-AA³-AA⁴-AA⁵-AA⁶-AA⁷-PEP5; wherein PEP5 is a peptide of formula PEP3-AA¹¹-AA¹²; wherein PEP3 is selected from the group consisting of VPT, APT, VPQ and VSQ; wherein AA¹¹ is selected from the group consisting of E, K, Q, R, A, D, G and H, in particular is E, K, Q, R, A and D; wherein AA¹² is selected from the group consisting of L, M, T, E, Q and H, in particular is L; wherein AA¹, AA², AA³, AA⁴, and AA⁵ are independently absent or AA^{I} as defined herein; wherein AA⁶ is absent or selected from the group consisting of S, T, C, E, Q, P and R, preferably is selected from the group consisting of T, S and C; wherein AA⁷ is selected from the group consisting of S, T, C, E, Q, P and R, preferably S or C. In one particular example, PEP9 is selected from the group consisting of KIPKAXXVPTEL (SEQ ID NO: 13745), SIPKAXXVPTEL (SEQ ID NO: 13773), HVTKPTXAPTKL (SEQ ID NO: 13721), YVPKPXXAPTKL (SEQ ID NO: 13793), TVPKPXXAPTQL (SEQ ID NO: 13785), STPPTXXVPTRL (SEQ ID NO: 13783), ASAAPXXVPQAL (SEQ ID NO: 13678), ASASPXXVSQDL (SEQ ID NO: 13688) and ASASPXXVPQDL (SEQ ID NO: 13686).

[0501] In certain embodiments useful for inducing the conversion of a neoplastic cell into a cell (any cell) of the ligament and tendon cell lineage, PEP12 is a peptide of general formula PEP1-AA¹⁷-PEP11; wherein AA¹⁷ is selected from the group consisting of G, A, V, L, I, P, F, M, W, T and S (in particular is selected from the group consisting of M, I, L, V and T); wherein PEP1 is selected from the group consisting of NAIS (SEQ ID NO: 13567), SPIS (SEQ ID NO: 13574), EPLP (SEQ ID NO: 13564) and EPLT (SEQ ID NO: 13565).

[0502] In certain embodiments useful for inducing the conversion of a neoplastic cell into a cell (any cell) of the ligament and tendon cell lineage, PEP11 is a peptide with 3 amino acids of general formula AA¹⁸-AA¹⁹-AA²⁰; wherein AA¹⁸ is selected from the group consisting of L, V, Q, A and R, in particular is L or V; wherein AA¹⁹ is selected from the group consisting of F, W, H and Y, in particular is Y or F; wherein AA²⁰ is selected from the group consisting of L, F, Y, K, I, V and M, in particular is selected from the group consisting of F, I and Y. In one particular example, PEP11 is selected from the group consisting of LYF, LFI, VYY and LYY.

[0503] In certain embodiments useful for inducing the conversion of a neoplastic cell into a cell (any cell) of the ligament and tendon cell lineage, PEP1 is selected from the group consisting of NAIS (SEQ ID NO: 13567), SPIS (SEQ ID NO: 13574), EPLP (SEQ ID NO: 13564) and EPLT (SEQ ID NO: 13565); PEP11 is selected from the group consisting of LYF, LFI, VYY and LYY; and the pair PEP1:PEP11 is selected from the group consisting of NAIS (SEQ ID NO: 13567):LYF, SPIS (SEQ ID NO: 13574):LFI, EPLP (SEQ ID NO: 13564):VYY and EPLT (SEQ ID NO: 13565):LYY.

[0504] The definitions of “PEP” pairs and triplets e.g. PEP3:PEP1, PEP5:PEP12, or PEP7:PEP5:PEP1, most particularly useful for inducing the conversion of a neoplastic cell into a cell (any cell) of the ligament and tendon cell lineage, are as already defined herein to the extent that PEP1, PEP3, PEP5, PEP7, PEP9, PEP11 and PEP12 are particularly useful for these applications as defined in the present L/T section.

[0505] In certain embodiments useful for inducing the conversion of a neoplastic cell into a cell (any cell) of the ligament and tendon cell lineage, said GFR-binding compound is a synthetic molecule as defined herein in the definition section.

[0506] In certain embodiments useful for inducing the conversion of a neoplastic cell into a cell (any cell) of the ligament and tendon cell lineage, said GFR-binding compound is a synthetic peptide, or a variant or analog thereof, or a peptidomimetic.

[0507] In other embodiments also useful for inducing the conversion of a neoplastic cell into a cell (any cell) of the ligament and tendon cell lineage, PEP1 is SPIS (SEQ ID NO: 13574).

[0508] In other embodiments also useful for inducing the conversion of a neoplastic cell into a cell (any cell) of the ligament and tendon cell lineage, PEP3 is selected from the group consisting of VPT, APT, TPT, VPA and APV.

[0509] In other embodiments also useful for inducing the conversion of a neoplastic cell into a cell (any cell) of the ligament and tendon cell lineage, PEP5 is a peptide of general formula PEP3-AA¹¹-AA¹²; wherein PEP3 is selected from the group consisting of VPT, APT, TPT, VPA and APV; wherein AA¹¹ is selected from the group consisting of E, K, Q, R, A, D, G and H, in particular is selected from the group consisting of E, K, Q and R; wherein AA¹² is selected from the group consisting of L, M, T, E, Q and H, in particular is selected from the group consisting of L, M and T. In one particular example, PEP5 is selected from the group consisting of VPTEL (SEQ ID NO: 13631), APTKL (SEQ ID NO: 13579), APTQL (SEQ ID NO: 13582), VPTKL (SEQ ID NO: 13633), TPTKM (SEQ ID NO: 13598), VPARL (SEQ ID NO: 13611), VPTRL (SEQ ID NO: 13637) and APVKT (SEQ ID NO: 13589).

[0510] In other embodiments also useful for inducing the conversion of a neoplastic cell into a cell (any cell) of the ligament and tendon cell lineage, PEP7 is an amino acid or a peptide with between two and seven amino acids of general formula AA¹-AA²-AA³-AA⁴-AA⁵-AA⁶-AA⁷ (SEQ ID NO: 13816); wherein AA¹, AA², AA³, AA⁴, and AA⁵ are independently absent or AA^{I} as defined herein; wherein AA⁶ is absent or selected from the group consisting of S, T, C, E, Q, P and R, preferably is S or C; wherein AA⁷ is absent or is selected from the group consisting of S, T, C, E, Q, P and R, preferably is S or C; and wherein at least one of AA¹, AA², AA³, AA⁴, AA⁵, AA⁶ or AA⁷ is not absent. In one particular example, PEP7 is selected from the group consisting of KIPKAXX (SEQ ID NO: 13655), SIPKAXX (SEQ ID NO: 13660), HVTKPTX (SEQ ID NO: 13653), YVPKPXX (SEQ ID NO: 13664), TVPKPXX (SEQ ID NO: 13663), AVPKAXX (SEQ ID NO: 13649), KVGKAXX (SEQ ID NO: 13656), KASKAXX (SEQ ID NO: 13654), GSAGPXX (SEQ ID NO: 13651), AAPAXXS, STPPTXX (SEQ ID NO: 13662), HVPKPXX (SEQ ID NO: 13652) and RVPSTXX (SEQ ID NO: 13659).

[0511] In other embodiments also useful for inducing the conversion of a neoplastic cell into a cell (any cell) of the ligament and tendon cell lineage, PEP9 is a peptide of general formula AA¹-AA²-AA³-AA⁴-AA⁵-AA⁶-AA⁷-PEP5; wherein PEP5 is a peptide of formula PEP3-AA¹¹-AA¹²; wherein PEP3 is selected from the group consisting of VPT, APT, TPT, VPA and APV; wherein AA¹¹ is selected from the group consisting of E, K, Q, R, A, D, G and H, in particular is E, K, Q and R; wherein AA¹² is selected from the group consisting of L, M, T, E, Q and H, in particular is L, M or T; wherein AA¹, AA², AA³, AA⁴, and AA⁵ are independently absent or AA^{I} as defined herein; wherein AA⁶ is absent or selected from the group consisting of S, T, C, E, Q, P and R, preferably is S or C; wherein AA⁷ is selected from the group consisting of S, T, C, E, Q, P and R, preferably is S or C. In one particular example, PEP9 is selected from the group consisting of KIPKAXXVPTEL (SEQ ID NO: 13745), SIPKAXXVPTEL (SEQ ID NO: 13773), HVTKPTXAPTKL (SEQ ID NO: 13721), YVPKPXXAPTKL (SEQ ID NO: 13793), TVPKPXXAPTQL (SEQ ID NO: 13785), AVPKAXXAPTKL (SEQ ID NO: 13689), KVGKAXXVPTKL (SEQ ID NO: 13753), KASKAXXVPTKL (SEQ ID NO: 13737), GSAGPXXTPTKL, AAPASXXVPARL (SEQ ID NO: 13668), STPPTXXVPTRL (SEQ ID NO: 13783), HVPKPXXAPTKL (SEQ ID NO: 13713) and RVPSTXXAPVKT (SEQ ID NO: 13760).

[0512] In other embodiments also useful for inducing the conversion of a neoplastic cell into a cell (any cell) of the ligament and tendon cell lineage, PEP12 is a peptide of general formula PEP1-AA¹⁷-PEP11; wherein AA¹⁷ is selected from the group consisting of G, A, V, L, I, P, F, M, W, T and S (in particular is selected from the group consisting of M, I, L, V and T); wherein PEP1 is SPIS (SEQ ID NO: 13574).

[0513] In other embodiments also useful for inducing the conversion of a neoplastic cell into a cell (any cell) of the ligament and tendon cell lineage, PEP11 is a peptide with 3 amino acids of general formula AA¹⁸-AA¹⁹-AA²⁰; wherein AA¹⁸ is selected from the group consisting of L, V, Q, A and R, in particular is L; wherein AA¹⁹ is selected from the group consisting of F, W, H and Y, in particular is a polar aromatic amino acid such as Y; wherein AA²⁰ is selected from the group consisting of L, F, Y, K, I, V and M, in particular is I. In one particular example, PEP11 is LYI.

[0514] In other embodiments also useful for inducing the conversion of a neoplastic cell into a cell (any cell) of the ligament and tendon cell lineage, PEP1 is SPIS (SEQ ID NO: 13574) and PEP11 is LYI.

[0515] The definitions of “PEP” pairs and triplets e.g. PEP3:PEP1, PEP5:PEP12, or PEP7:PEP5:PEP1, also most particularly useful for inducing the conversion of a neoplastic cell into a cell (any cell) of the ligament and tendon cell lineage, are as already defined herein to the extent that PEP1, PEP3, PEP5, PEP7, PEP9, PEP11 and PEP12 are particularly useful for these applications as defined in the present L/T section.

[0516] In other embodiments also useful for inducing the conversion of a neoplastic cell into a cell (any cell) of the ligament and tendon cell lineage, said GFR-binding compound is a synthetic molecule as defined herein in the definition section.

[0517] In other embodiments also useful for inducing the conversion of a neoplastic cell into a cell (any cell) of the ligament and tendon cell lineage, said GFR-binding compound is a synthetic peptide, or a variant or analog thereof, or a peptidomimetic.

### Fibroblast Lineage

[0518] Certain embodiments of the invention are particularly useful for inducing the conversion of a neoplastic cell into a cell (any cell) of a fibroblast lineage.

[0519] Certain embodiments of the invention are particularly useful for inducing the conversion of a neoplastic cell into a cell (any cell) of a fibroblast lineage.

[0520] In certain embodiments useful for inducing the conversion of a neoplastic cell into a cell (any cell) of a fibroblast lineage, PEP1 is selected from the group consisting of EPLP (SEQ ID NO: 13564), EPLT (SEQ ID NO: 13565), SNIT (SEQ ID NO: 13572), RSVK (SEQ ID NO: 13569) and RPVQ (SEQ ID NO: 13568).

[0521] In certain embodiments useful for inducing the conversion of a neoplastic cell into a cell (any cell) of a fibroblast lineage, PEP3 is selected from the group consisting of VPT, APT, VPQ, VSQ, SRV and TQV.

[0522] In certain embodiments useful for inducing the conversion of a neoplastic cell into a cell (any cell) of a fibroblast lineage, PEP5 is a peptide of general formula PEP3-AA¹¹-AA¹²; wherein PEP3 is selected from the group consisting of VPT, APT, VPQ, VSQ, SRV and TQV; wherein AA¹¹ is selected from the group consisting of E, K, Q, R, A, D, G and H, in particular is selected from the group consisting of E, K, Q, A, D and H; wherein AA¹² is selected from the group consisting of L, M, T, E, Q and H, in particular is selected from the group consisting of L, E and H. In one particular example, PEP5 is selected from the group consisting of VPTEL (SEQ ID NO: 13631), APTKL (SEQ ID NO: 13579), APTQL (SEQ ID NO: 13582), VPQAL (SEQ ID NO: 13620), VSQDL (SEQ ID NO: 13639), VPQDL (SEQ ID NO: 13621), VPTEE (SEQ ID NO: 13630), SRVHH (SEQ ID NO: 13592) and TQVQL (SEQ ID NO: 13603).

[0523] In certain embodiments useful for inducing the conversion of a neoplastic cell into a cell (any cell) of a fibroblast lineage, PEP7 is an amino acid or a peptide with between two and seven amino acids of general formula AA¹-AA²-AA³-AA⁴-AA⁵-AA⁶-AA⁷ (SEQ ID NO: 13816); wherein AA¹, AA², AA³, AA⁴, and AA⁵ are independently absent or AA^{I} as defined herein; wherein AA⁶ is absent or selected from the group consisting of S, T, C, E, Q, P and R, preferably is selected from the group consisting of C, S, T, E, R and Q; wherein AA⁷ is absent or is selected from the group consisting of S, T, C, E, Q, P and R, preferably is selected from the group consisting of S, C and P; and wherein at least one of AA¹, AA², AA³, AA⁴, AA⁵, AA⁶ or AA⁷ is not absent. In one particular example, PEP7 is selected from the group consisting of KIPKAXX (SEQ ID NO: 13655), SIPKAXX (SEQ ID NO: 13660), HVTKPTX (SEQ ID NO: 13653), YVPKPXX (SEQ ID NO: 13664), TVPKPXX (SEQ ID NO: 13663), ASAAPXX (SEQ ID NO: 13647), ASASPXX (SEQ ID NO: 13648), NDEGLEX (SEQ ID NO: 13657), SSVKXQP (SEQ ID NO: 13661) and RNVQXRP (SEQ ID NO: 13658).

[0524] In certain embodiments useful for inducing the conversion of a neoplastic cell into a cell (any cell) of a fibroblast lineage, PEP9 is a peptide of general formula AA¹-AA²-AA³-AA⁴-AA⁵-AA⁶-AA⁷-PEP5; wherein PEP5 is a peptide of formula PEP3-AA¹¹-AA¹²; wherein PEP3 is selected from the group consisting of VPT, APT, VPQ, VSQ, SRV and TQV; wherein AA¹¹ is selected from the group consisting of E, K, Q, R, A, D, G and H, in particular is selected from the group consisting of E, K, Q, A, D and H; wherein AA¹² is selected from the group consisting of L, M, T, E, Q and H, in particular is selected from the group consisting of L, E and H; wherein AA¹, AA², AA³, AA⁴, and AA⁵ are independently absent or AA^{I} as defined herein; wherein AA⁶ is absent or selected from the group consisting of S, T, C, E, Q, P and R, preferably is selected from the group consisting of C, S, T, E, R and Q; wherein AA⁷ is selected from the group consisting of S, T, C, E, Q, P and R, preferably is selected from the group consisting of S, C and P. In one particular example, PEP9 is selected from the group consisting of KIPKAXXVPTEL (SEQ ID NO: 13745), SIPKAXXVPTEL (SEQ ID NO: 13773), HVTKPTXAPTKL (SEQ ID NO: 13721), YVPKPXXAPTKL (SEQ ID NO: 13793), TVPKPXXAPTQL (SEQ ID NO: 13785), ASAAPXXVPQAL (SEQ ID NO: 13678), ASASPXXVSQDL (SEQ ID NO: 13688), ASASPXXVPQDL (SEQ ID NO: 13686), NDEGLEXVPTEE (SEQ ID NO: 13755), SSVKXQPSRVHH (SEQ ID NO: 13775) and RNVQXRPTQVQL (SEQ ID NO: 13758).

[0525] In certain embodiments useful for inducing the conversion of a neoplastic cell into a cell (any cell) of a fibroblast lineage, PEP12 is a peptide of general formula PEP1-AA¹⁷-PEP11; wherein AA¹⁷ is selected from the group consisting of G, A, V, L, I, P, F, M, W, T and S (in particular is selected from the group consisting of M, I, L, V and T); wherein PEP1 is selected from the group consisting of EPLP (SEQ ID NO: 13564), EPLT (SEQ ID NO: 13565), SNIT (SEQ ID NO: 13572), RSVK (SEQ ID NO: 13569) and RPVQ (SEQ ID NO: 13568).

[0526] In certain embodiments useful for inducing the conversion of a neoplastic cell into a cell (any cell) of a fibroblast lineage, PEP11 is a peptide with 3 amino acids of general formula AA¹⁸-AA¹⁹-AA²⁰; wherein AA¹⁸ is selected from the group consisting of L, V, Q, A and R; wherein AA¹⁹ is selected from the group consisting of F, W, H, Y, I and K, in particular is selected from the group consisting of Y, I and K; wherein AA²⁰ is selected from the group consisting of L, F, Y, K, I, V and M, in particular is selected from the group consisting of Y, M, V and I. In one particular example, PEP11 is selected from the group consisting of VYY, LYY, QIM, AKV and RKI.

[0527] In certain embodiments useful for inducing the conversion of a neoplastic cell into a cell (any cell) of a fibroblast lineage, PEP1 is selected from the group consisting of EPLP (SEQ ID NO: 13564), EPLT (SEQ ID NO: 13565), SNIT (SEQ ID NO: 13572), RSVK (SEQ ID NO: 13569) and RPVQ (SEQ ID NO: 13568); PEP11 is selected from the group consisting of VYY, LYY, QIM, AKV and RKI; and the pair PEP1:PEP11 is selected from the group consisting of EPLP (SEQ ID NO: 13564):VYY, EPLT (SEQ ID NO: 13565):LYY, SNIT (SEQ ID NO: 13572):QIM, RSVK (SEQ ID NO: 13569):KEVQV and RPVQ (SEQ ID NO: 13568):KKATV.

[0528] The definitions of “PEP” pairs and triplets e.g. PEP3:PEP1, PEP5:PEP12, or PEP7:PEP5:PEP1, also most particularly useful for inducing the conversion of a neoplastic cell into a cell (any cell) of a fibroblast lineage, are as already defined herein to the extent that PEP1, PEP3, PEP5, PEP7, PEP9, PEP11 and PEP12 are particularly useful for these applications as defined in the present skin regeneration section.

[0529] In certain embodiments useful for inducing the conversion of a neoplastic cell into a cell (any cell) of a fibroblast lineage, said GFR-binding compound is a synthetic molecule as defined herein in the definition section.

[0530] In certain embodiments useful for inducing the conversion of a neoplastic cell into a cell (any cell) of a fibroblast lineage, said GFR-binding compound is a synthetic peptide, or a variant or analog thereof, or a peptidomimetic.

### Reproduction System Lineage

[0531] Certain embodiments of the invention are particularly useful for inducing the conversion of a neoplastic cell into a cell (any cell) of the reproduction system lineage.

[0532] In certain embodiments useful for inducing the conversion of a neoplastic cell into a cell (any cell) of the reproduction system lineage, PEP1 is NAIS (SEQ ID NO: 13567).

[0533] In certain embodiments useful for inducing the conversion of a neoplastic cell into a cell (any cell) of the reproduction system lineage, PEP3 is selected from the group consisting of VPT, APT, TPT, VPA and APV.

[0534] In certain embodiments useful for inducing the conversion of a neoplastic cell into a cell (any cell) of the reproduction system lineage, PEP5 is a peptide of general formula PEP3-AA¹¹-AA¹²; wherein PEP3 is selected from the group consisting of VPT, APT, TPT, VPA and APV; wherein AA¹¹ is selected from the group consisting of E, K, Q, R, A, D, G and H, in particular is selected from the group consisting of E, K, Q and R; wherein AA¹² is selected from the group consisting of L, M, T, E, Q and H, in particular is selected from the group consisting of L, M and T. In one particular example, PEP5 is selected from the group consisting of VPTEL (SEQ ID NO: 13631), APTKL (SEQ ID NO: 13579), APTQL (SEQ ID NO: 13582), VPTKL (SEQ ID NO: 13633), TPTKM (SEQ ID NO: 13598), VPARL (SEQ ID NO: 13611), VPTRL (SEQ ID NO: 13637) and APVKT (SEQ ID NO: 13589).

[0535] In certain embodiments useful for inducing the conversion of a neoplastic cell into a cell (any cell) of the reproduction system lineage, PEP7 is an amino acid or a peptide with between two and seven amino acids of general formula AA¹-AA²-AA³-AA⁴-AA⁵-AA⁶-AA⁷ (SEQ ID NO: 13816); wherein AA¹, AA², AA³, AA⁴, and AA⁵ are independently absent or AA^{I} as defined herein; wherein AA⁶ is absent or selected from the group consisting of S, T, C, E, Q, P and R, preferably is selected from the group consisting of C, S and T; wherein AA⁷ is absent or is selected from the group consisting of S, T, C, E, Q, P and R, preferably is selected from the group consisting of S and C; and wherein at least one of AA¹, AA², AA³, AA⁴, AA⁵, AA⁶ or AA⁷ is not absent. In one particular example, PEP7 is selected from the group consisting of KIPKAXX (SEQ ID NO: 13655), SIPKAXX (SEQ ID NO: 13660), HVTKPTX (SEQ ID NO: 13653), YVPKPXX (SEQ ID NO: 13664), TVPKPXX (SEQ ID NO: 13663), AVPKAXX (SEQ ID NO: 13649), KVGKAXX (SEQ ID NO: 13656), KASKAXX (SEQ ID NO: 13654), GSAGPXX (SEQ ID NO: 13651), AAPASXX (SEQ ID NO: 13646), STPPTXX (SEQ ID NO: 13662), HVPKPXX (SEQ ID NO: 13652) and RVPSTXX (SEQ ID NO: 13659).

[0536] In certain embodiments useful for inducing the conversion of a neoplastic cell into a cell (any cell) of the reproduction system lineage, PEP9 is a peptide of general formula AA¹-AA²-AA³-AA⁴-AA⁵-AA⁶-AA⁷-PEP5; wherein PEP5 is a peptide of formula PEP3-AA¹¹-AA¹²; wherein PEP3 is selected from the group consisting of VPT, APT, TPT, VPA and APV; wherein AA¹¹ is selected from the group consisting of E, K, Q, R, A, D, G and H, in particular is selected from the group consisting of E, K, Q and R; wherein AA¹² is selected from the group consisting of L, M, T, E, Q and H, in particular is selected from the group consisting of L, M and T; wherein AA¹, AA², AA³, AA⁴, and AA⁵ are independently absent or AA^{I} as defined herein; wherein AA⁶ is absent or selected from the group consisting of S, T, C, E, Q, P and R, preferably is selected from the group consisting of C, S and T; wherein AA⁷ is selected from the group consisting of S, T, C, E, Q, P and R, preferably is selected from the group consisting of S and C. In one particular example, PEP9 is selected from the group consisting of KIPKAXXVPTEL (SEQ ID NO: 13745), SIPKAXXVPTEL (SEQ ID NO: 13773), HVTKPTXAPTKL (SEQ ID NO: 13721), YVPKPXXAPTKL (SEQ ID NO: 13793), TVPKPXXAPTQL (SEQ ID NO: 13785), AVPKAXXAPTKL (SEQ ID NO: 13689), KVGKAXXVPTKL (SEQ ID NO: 13753), KASKAXXVPTKL (SEQ ID NO: 13737), GSAGPXXTPTKM (SEQ ID NO: 13707), AAPASXXVPARL (SEQ ID NO: 13668), STPPTXXVPTRL (SEQ ID NO: 13783), HVPKPXXAPTKL (SEQ ID NO: 13713) and RVPSTXXAPVKT (SEQ ID NO: 13760).

[0537] In certain embodiments useful for inducing the conversion of a neoplastic cell into a cell (any cell) of the reproduction system lineage, PEP12 is a peptide of general formula PEP1-AA¹⁷-PEP11; wherein AA¹⁷ is selected from the group consisting of G, A, V, L, I, P, F, M, W, T and S (in particular is selected from the group consisting of M, I, L, V and T); wherein PEP1 is NAIS (SEQ ID NO: 13567).

[0538] In certain embodiments useful for inducing the conversion of a neoplastic cell into a cell (any cell) of the reproduction system lineage, PEP11 is a peptide with 3 amino acids of general formula AA¹⁸-AA¹⁹-AA²⁰; wherein AA¹⁸ is selected from the group consisting of L, V, Q, A and R, in particular is L; wherein AA¹⁹ is selected from the group consisting of F, W, H, Y, I and K, in particular is Y; wherein AA²⁰ is selected from the group consisting of L, F, Y, K, I, V and M, in particular is F. In one particular example, PEP11 is LYF.

[0539] In certain embodiments useful for inducing the conversion of a neoplastic cell into a cell (any cell) of the reproduction system lineage, PEP1 is NAIS (SEQ ID NO: 13567) and PEP11 is LYF.

[0540] The definitions of “PEP” pairs and triplets e.g. PEP3:PEP1, PEP5:PEP12, or PEP7:PEP5:PEP1, also most particularly useful for inducing the conversion of a neoplastic cell into a cell (any cell) of the reproduction system lineage, are as already defined herein to the extent that PEP1, PEP3, PEP5, PEP7, PEP9, PEP11 and PEP12 are particularly useful for these applications as defined in the present fertility and reproduction section.

[0541] In certain embodiments useful for inducing the conversion of a neoplastic cell into a cell (any cell) of the reproduction system lineage, said GFR-binding compound is a synthetic molecule as defined herein in the definition section.

[0542] In certain embodiments useful for inducing the conversion of a neoplastic cell into a cell (any cell) of the reproduction system lineage, said GFR-binding compound is a synthetic peptide, or a variant or analog thereof, or a peptidomimetic.

### Lung Cell Lineage

[0543] Certain embodiments of the invention are particularly useful for inducing the conversion of a neoplastic cell into a cell (any cell) of the lung cell lineage.

[0544] In certain embodiments useful for inducing the conversion of a neoplastic cell into a cell (any cell) of the lung cell lineage, PEP1 is selected from the group consisting of NAIS (SEQ ID NO: 13567), SATS (SEQ ID NO: 13571), SPIS (SEQ ID NO: 13574), EPIS (SEQ ID NO: 13563) and SPIN (SEQ ID NO: 13573).

[0545] In certain embodiments useful for inducing the conversion of a neoplastic cell into a cell (any cell) of the lung cell lineage, PEP3 is selected from the group consisting of VPT, VPE, APT, TPT, VPA, APV, VPQ and VSQ.

[0546] In certain embodiments useful for inducing the conversion of a neoplastic cell into a cell (any cell) of the lung cell lineage, PEP5 is a peptide of general formula PEP3-AA¹¹-AA¹²; wherein PEP3 is selected from the group consisting of VPT, VPE, APT, TPT, VPA, APV, VPQ and VSQ; wherein AA¹¹ is selected from the group consisting of E, K, Q, R, A, D, G and H, in particular is selected from the group consisting of E, K, Q, R, A and D; wherein AA¹² is selected from the group consisting of L, M, T, E, Q and H, in particular selected from the group consisting of L, M and T. In one particular example, PEP5 is selected from the group consisting of VPTEL (SEQ ID NO: 13631), VPEKM (SEQ ID NO: 13616), APTKL (SEQ ID NO: 13579), APTQL (SEQ ID NO: 13582), VPTKL (SEQ ID NO: 13633), TPTKM (SEQ ID NO: 13598), VPARL (SEQ ID NO: 13611), VPTRL (SEQ ID NO: 13637), APVKT (SEQ ID NO: 13589), VPQAL (SEQ ID NO: 13620), VSQDL (SEQ ID NO: 13639) and VPQDL (SEQ ID NO: 13621).

[0547] In certain embodiments useful for inducing the conversion of a neoplastic cell into a cell (any cell) of the lung cell lineage, PEP7 is an amino acid or a peptide with between two and seven amino acids of general formula AA¹-AA²-AA³-AA⁴-AA⁵-AA⁶-AA⁷ (SEQ ID NO: 13816); wherein AA¹, AA², AA³, AA⁴, and AA⁵ are independently absent or AA^{I} as defined herein; wherein AA⁶ is absent or selected from the group consisting of S, T, C, E, Q, P and R, preferably is selected from the group consisting of C, S and T; wherein AA⁷ is absent or is selected from the group consisting of S, T, C, E, Q, P and R, preferably is C or S; and wherein at least one of AA¹, AA², AA³, AA⁴, AA⁵, AA⁶ or AA⁷ is not absent. In one particular example, PEP7 is selected from the group consisting of KIPKAXX (SEQ ID NO: 13655), GIPEPXX (SEQ ID NO: 13650), SIPKAXX (SEQ ID NO: 13660), HVTKPTX (SEQ ID NO: 13653), YVPKPXX (SEQ ID NO: 13664), TVPKPXX (SEQ ID NO: 13663), AVPKAXX (SEQ ID NO: 13649), KVGKAXX (SEQ ID NO: 13656), KASKAXX (SEQ ID NO: 13654), GSAGPXX (SEQ ID NO: 13651), AAPASXX (SEQ ID NO: 13646), STPPTXX (SEQ ID NO: 13662), HVPKPXX (SEQ ID NO: 13652), RVPSTXX (SEQ ID NO: 13659), ASAAPXX (SEQ ID NO: 13647) and ASASPXX (SEQ ID NO: 13648).

[0548] In certain embodiments useful for inducing the conversion of a neoplastic cell into a cell (any cell) of the lung cell lineage, PEP9 is a peptide of general formula AA¹-AA²-AA³-AA⁴-AA⁵-AA⁶-AA⁷-PEP5; wherein PEP5 is a peptide of formula PEP3-AA¹¹-AA¹²; wherein PEP3 is selected from the group consisting of VPT, VPE, APT, TPT, VPA, APV, VPQ and VSQ; wherein AA¹¹ is selected from the group consisting of E, K, Q, R, A, D, G and H, in particular E, K, Q, R, A and D; wherein AA¹² is selected from the group consisting of L, M, T, E, Q and H, in particular selected from the group consisting of L, M and T; wherein AA¹, AA², AA³, AA⁴, and AA⁵ are independently absent or AA^{I} as defined herein; wherein AA⁶ is absent or selected from the group consisting of S, T, C, E, Q, P and R, preferably is selected from the group consisting of C, S and T; wherein AA⁷ is selected from the group consisting of S, T, C, E, Q, P and R, preferably is C or S. In one particular example, PEP9 is selected from the group consisting of KIPKAXXVPTEL (SEQ ID NO: 13745), GIPEPXXVPEKM (SEQ ID NO: 13701), SIPKAXXVPTEL (SEQ ID NO: 13773), HVTKPTXAPTKL (SEQ ID NO: 13721), YVPKPXXAPTKL (SEQ ID NO: 13793), TVPKPXXAPTQL (SEQ ID NO: 13785), AVPKAXXAPTKL (SEQ ID NO: 13689), KVGKAXXVPTKL (SEQ ID NO: 13753), KASKAXXVPTKL (SEQ ID NO: 13737), GSAGPXXTPTKM (SEQ ID NO: 13707), AAPASXXVPARL (SEQ ID NO: 13668), STPPTXXVPTRL (SEQ ID NO: 13783), HVPKPXXAPTKL (SEQ ID NO: 13713), RVPSTXXAPVKT (SEQ ID NO: 13760), ASAAPXXVPQAL (SEQ ID NO: 13678), ASASPXXVSQDL (SEQ ID NO: 13688) and ASASPXXVPQDL (SEQ ID NO: 13686).

[0549] In certain embodiments useful for inducing the conversion of a neoplastic cell into a cell (any cell) of the lung cell lineage, PEP12 is a peptide of general formula PEP1-AA¹⁷-PEP11; wherein AA¹⁷ is selected from the group consisting of G, A, V, L, I, P, F, M, W, T and S (in particular is selected from the group consisting of M, I, L, V and T); wherein PEP1 is selected from the group consisting of NAIS (SEQ ID NO: 13567), SATS (SEQ ID NO: 13571), SPIS (SEQ ID NO: 13574), EPIS (SEQ ID NO: 13563) and SPIN (SEQ ID NO: 13573).

[0550] In certain embodiments useful for inducing the conversion of a neoplastic cell into a cell (any cell) of the lung cell lineage, PEP11 is a peptide with 3 amino acids of general formula AA¹⁸-AA¹⁹-AA²⁰; wherein AA¹⁸ is selected from the group consisting of L, V, Q, A and R, in particular is L; wherein AA¹⁹ is selected from the group consisting of F, W, H and Y (in particular is a polar aromatic amino acid such as Y); wherein AA²⁰ is selected from the group consisting of L, F, Y, K, I, V and M, in particular is selected from the group consisting of L, F, Y, and K. In one particular example, PEP11 is selected from the group consisting of LYF, LYY, LYK and LYL.

[0551] In certain embodiments useful for inducing the conversion of a neoplastic cell into a cell (any cell) of the lung cell lineage, PEP1 is selected from the group consisting of NAIS (SEQ ID NO: 13567), SATS (SEQ ID NO: 13571), SPIS (SEQ ID NO: 13574), EPIS (SEQ ID NO: 13563) and SPIN (SEQ ID NO: 13573); PEP11 is selected from the group consisting of LYF, LYY, LYK and LYL; and the pair PEP1:PEP11 is selected from the group consisting of NAIS (SEQ ID NO: 13567):LYF, SATS (SEQ ID NO: 13571):LYY, SPIS (SEQ ID NO: 13574):LYK, EPIS (SEQ ID NO: 13563):LYL and SPIN (SEQ ID NO: 13573):LYF.

[0552] The definitions of “PEP” pairs and triplets e.g. PEP3:PEP1, PEP5:PEP12, or PEP7:PEP5:PEP1, also most particularly useful for inducing the conversion of a neoplastic cell into a cell (any cell) of the lung cell lineage, are as already defined herein to the extent that PEP1, PEP3, PEP5, PEP7, PEP9, PEP11 and PEP12 are particularly useful for these applications as defined in the present lung section.

[0553] In certain embodiments useful for inducing the conversion of a neoplastic cell into a cell (any cell) of the lung cell lineage, said GFR-binding compound is a synthetic molecule as defined herein in the definition section.

[0554] In certain embodiments useful for inducing the conversion of a neoplastic cell into a cell (any cell) of the lung cell lineage, said GFR-binding compound is a synthetic peptide, or a variant or analog thereof, or a peptidomimetic.

### Muscle Cell Lineage

[0555] Certain embodiments of the invention are particularly useful for inducing the conversion of a neoplastic cell into a cell (any cell) of the muscle cell lineage.

[0556] In certain embodiments useful for inducing the conversion of a neoplastic cell into a cell (any cell) of the muscle cell lineage, PEP1 is RSVK (SEQ ID NO: 13569) or RPVQ (SEQ ID NO: 13568).

[0557] In certain embodiments useful for inducing the conversion of a neoplastic cell into a cell (any cell) of the muscle cell lineage, PEP3 is selected from the group consisting of VPQ, VSQ, VPT, SRV and TQV.

[0558] In certain embodiments useful for inducing the conversion of a neoplastic cell into a cell (any cell) of the muscle cell lineage, PEP5 is a peptide of general formula PEP3-AA¹¹-AA¹²; wherein PEP3 is selected from the group consisting of VPQ, VSQ, VPT, SRV and TQV; wherein AA¹¹ is selected from the group consisting of E, K, Q, R, A, D, G and H, in particular A, D, E, H, Q and G; wherein AA¹² is selected from the group consisting of L, M, T, E, Q and H, in particular L, E, H and Q. In one particular example, PEP5 is selected from the group consisting of VPQAL (SEQ ID NO: 13620), VSQDL (SEQ ID NO: 13639), VPQDL (SEQ ID NO: 13621), VPTEE (SEQ ID NO: 13630), VPTGQ (SEQ ID NO: 13632), SRVHH (SEQ ID NO: 13592) and TQVQL (SEQ ID NO: 13603).

[0559] In certain embodiments useful for inducing the conversion of a neoplastic cell into a cell (any cell) of the muscle cell lineage, PEP7 is an amino acid or a peptide with between two and seven amino acids of general formula AA¹-AA²-AA³-AA⁴-AA⁵-AA⁶-AA⁷ (SEQ ID NO: 13816); wherein AA¹, AA², AA³, AA⁴, and AA⁵ are independently absent or AA^{I} as defined herein; wherein AA⁶ is absent or selected from the group consisting of S, T, C, E, Q, P and R, preferably C, S, Q, R or E; wherein AA⁷ is absent or is selected from the group consisting of S, T, C, E, Q, P and R, preferably is S, P or C; and wherein at least one of AA¹, AA², AA³, AA⁴, AA⁵, AA⁶ or AA⁷ is not absent. In one particular example, PEP7 is selected from the group consisting of ASAAPXX (SEQ ID NO: 13647), ASASPXX (SEQ ID NO: 13648), NDEGLEX (SEQ ID NO: 13657), SSVKXQP (SEQ ID NO: 13661) and RNVQXRP (SEQ ID NO: 13658).

[0560] In certain embodiments useful for inducing the conversion of a neoplastic cell into a cell (any cell) of the muscle cell lineage, PEP9 is a peptide of general formula AA¹-AA²-AA³-AA⁴-AA⁵-AA⁶-AA⁷-PEP5; wherein PEP5 is a peptide of formula PEP3-AA¹¹-AA¹²; wherein PEP3 is selected from the group consisting of VPQ, VSQ, VPT, SRV and TQV; wherein AA¹¹ is selected from the group consisting of E, K, Q, R, A, D, G and H, in particular A, D, E, H, Q and G; wherein AA¹² is selected from the group consisting of L, M, T, E, Q and H, in particular L, E, H and Q; wherein AA¹, AA², AA³, AA⁴, and AA⁵ are independently absent or AA^{I} as defined herein; wherein AA⁶ is absent or selected from the group consisting of S, T, C, E, Q, P and R, preferably C, S, Q, R or E; wherein AA⁷ is absent or is selected from the group consisting of S, T, C, E, Q, P and R, preferably is S, P or C. In one particular example, PEP9 is selected from the group consisting of ASAAPXXVPQAL (SEQ ID NO: 13678), ASASPXXVSQDL (SEQ ID NO: 13688), ASASPXXVPQDL (SEQ ID NO: 13686), NDEGLEXVPTEE (SEQ ID NO: 13755), NDEGLEXVPTGQ (SEQ ID NO: 13756), SSVKXQPSRVHH (SEQ ID NO: 13775) and RNVQXRPTQVQL (SEQ ID NO: 13758).

[0561] In certain embodiments useful for inducing the conversion of a neoplastic cell into a cell (any cell) of the muscle cell lineage, PEP12 is a peptide of general formula PEP1-AA¹⁷-PEP11; wherein AA¹⁷ is selected from the group consisting of G, A, V, L, I, P, F, M, W, T and S (in particular is I or M); wherein PEP1 is RSVK (SEQ ID NO: 13569) or RPVQ (SEQ ID NO: 13568).

[0562] In certain embodiments useful for inducing the conversion of a neoplastic cell into a cell (any cell) of the muscle cell lineage, PEP11 is a peptide with 3 amino acids of general formula AA¹⁸-AA¹⁹-AA²⁰; wherein AA¹⁸ is selected from the group consisting of L, V, Q, A and R, in particular is A or R; wherein AA¹⁹ is selected from the group consisting of AA^{VII} amino acids (in particular is K); wherein AA²⁰ is selected from the group consisting of L, F, Y, K, I, V and M, in particular is V or I. In one particular example, PEP11 is AKV or RKI.

[0563] In certain embodiments useful for inducing the conversion of a neoplastic cell into a cell (any cell) of the muscle cell lineage, PEP1 is RSVK (SEQ ID NO: 13569) or RPVQ (SEQ ID NO: 13568); PEP11 is AKV or RKI; and the pair PEP1:PEP11 is RSVK (SEQ ID NO: 13569):AKV or RPVQ (SEQ ID NO: 13568):RKI.

[0564] The definitions of “PEP” pairs and triplets e.g. PEP3:PEP1, PEP5:PEP12, or PEP7:PEP5:PEP1, useful for inducing the conversion of a neoplastic cell into a cell (any cell) of the muscle cell lineage, are as already defined herein to the extent that PEP1, PEP3, PEP5, PEP7, PEP9, PEP11 and PEP12 are particularly useful for these applications as defined in the present muscle section.

[0565] In certain embodiments useful for inducing the conversion of a neoplastic cell into a cell (any cell) of the muscle cell lineage, said GFR-binding compound is a synthetic molecule as defined herein in the definition section.

[0566] In certain embodiments useful for inducing the conversion of a neoplastic cell into a cell (any cell) of the muscle cell lineage, said GFR-binding compound is a synthetic peptide, or a variant or analog thereof, or a peptidomimetic.

### Blood Cell Lineage

[0567] Certain embodiments of the invention are particularly useful for inducing the conversion of a neoplastic cell into a cell (any cell) of the blood cell lineage.

[0568] In certain embodiments useful for inducing the conversion of a neoplastic cell into a cell (any cell) of the blood cell lineage, PEP1 is SNIT (SEQ ID NO: 13572).

[0569] In certain embodiments useful for inducing the conversion of a neoplastic cell into a cell (any cell) of the blood cell lineage, PEP3 is selected from the group consisting of TPT, VPA, VPT, APT, APV, VPQ, VSQ, SRV and TQV.

[0570] In certain embodiments useful for inducing the conversion of a neoplastic cell into a cell (any cell) of the blood cell lineage, PEP5 is a peptide of general formula PEP3-AA¹¹-AA¹²; wherein PEP3 is selected from the group consisting of TPT, VPA, VPT, APT, APV, VPQ, VSQ, SRV and TQV; wherein AA¹¹ is selected from the group consisting of E, K, Q, R, A, D, G and H; wherein AA¹² is selected from the group consisting of L, M, T, E, Q and H. In one particular example, PEP5 is selected from the group consisting of TPTKM (SEQ ID NO: 13598), VPARL (SEQ ID NO: 13611), VPTRL (SEQ ID NO: 13637), APTKL (SEQ ID NO: 13579), APVKT (SEQ ID NO: 13589), VPQAL (SEQ ID NO: 13620), VSQDL (SEQ ID NO: 13639), VPQDL (SEQ ID NO: 13621), VPTEE (SEQ ID NO: 13630), VPTGQ (SEQ ID NO: 13632), SRVHH (SEQ ID NO: 13592) and TQVQL (SEQ ID NO: 13603).

[0571] In certain embodiments useful for inducing the conversion of a neoplastic cell into a cell (any cell) of the blood cell lineage, PEP7 is an amino acid or a peptide with between two and seven amino acids of general formula AA¹-AA²-AA³-AA⁴-AA⁵-AA⁶-AA⁷ (SEQ ID NO: 13816); wherein AA¹, AA², AA³, AA⁴, and AA⁵ are independently absent or AA^{I} as defined herein; wherein AA⁶ is absent or selected from the group consisting of S, T, C, E, Q, P and R, preferably is selected from the group consisting of S, C, E, Q and R; wherein AA⁷ is absent or is selected from the group consisting of S, T, C, E, Q, P and R, preferably is selected from the group consisting of C, S and P; and wherein at least one of AA¹, AA², AA³, AA⁴, AA⁵, AA⁶ or AA⁷ is not absent. In one particular example, PEP7 is selected from the group consisting of GSAGPXX (SEQ ID NO: 13651), AAPASXX (SEQ ID NO: 13646), STPPTXX (SEQ ID NO: 13662), HVPKPXX (SEQ ID NO: 13652), RVPSTXX (SEQ ID NO: 13659), ASAAPXX (SEQ ID NO: 13647), ASASPXX (SEQ ID NO: 13648), NDEGLEX (SEQ ID NO: 13657), SSVKXQP (SEQ ID NO: 13661) and RNVQXRP (SEQ ID NO: 13658).

[0572] In certain embodiments useful for inducing the conversion of a neoplastic cell into a cell (any cell) of the blood cell lineage, PEP9 is a peptide of general formula AA¹-AA²-AA³-AA⁴-AA⁵-AA⁶-AA⁷-PEP5; wherein PEP5 is a peptide of formula PEP3-AA¹¹-AA¹²; wherein PEP3 is selected from the group consisting of TPT, VPA, VPT, APT, APV, VPQ, VSQ, SRV and TQV; wherein AA¹¹ is selected from the group consisting of E, K, Q, R, A, D, G and H; wherein AA¹² is selected from the group consisting of L, M, T, E, Q and H; wherein AA¹, AA², AA³, AA⁴, and AA⁵ are independently absent or AA^{I} as defined herein; wherein AA⁶ is absent or selected from the group consisting of S, T, C, E, Q, P and R, preferably is selected from the group consisting of S, C, E, Q and R; wherein AA⁷ is absent or is selected from the group consisting of S, T, C, E, Q, P and R, preferably is selected from the group consisting of C, S and P. In one particular example, PEP9 is selected from the group consisting of GSAGPXXTPTKM (SEQ ID NO: 13707), AAPASXXVPARL (SEQ ID NO: 13668), STPPTXXVPTRL (SEQ ID NO: 13783), HVPKPXXAPTKL (SEQ ID NO: 13713), RVPSTXXAPVKT (SEQ ID NO: 13760), ASAAPXXVPQAL (SEQ ID NO: 13678), ASASPXXVSQDL (SEQ ID NO: 13688), ASASPXXVPQDL (SEQ ID NO: 13686), NDEGLEXVPTEE (SEQ ID NO: 13755), NDEGLEXVPTGQ (SEQ ID NO: 13756), SSVKXQPSRVHH (SEQ ID NO: 13775) and RNVQXRPTQVQL (SEQ ID NO: 13758).

[0573] In certain embodiments useful for inducing the conversion of a neoplastic cell into a cell (any cell) of the blood cell lineage, PEP12 is a peptide of general formula PEP1-AA¹⁷-PEP11; wherein AA¹⁷ is selected from the group consisting of G, A, V, L, I, P, F, M, W, T and S (in particular is selected from the group consisting of M, I, V and T); wherein PEP1 is SNIT (SEQ ID NO: 13572).

[0574] In certain embodiments useful for inducing the conversion of a neoplastic cell into a cell (any cell) of the blood cell lineage, PEP11 is a peptide with 3 amino acids of general formula AA¹⁸-AA¹⁹-AA²⁰; wherein AA¹⁸ is selected from the group consisting of L, V, Q, A and R, in particular is Q; wherein AA¹⁹ is selected from the group consisting of F, W, H, I and Y (in particular is I); wherein AA²⁰ is selected from the group consisting of L, F, Y, K, I, V and M, in particular is M. In one particular example, PEP11 is QIM.

[0575] In certain embodiments useful for inducing the conversion of a neoplastic cell into a cell (any cell) of the blood cell lineage, PEP1 is SNIT (SEQ ID NO: 13572) and PEP11 is QIM.

[0576] The definitions of “PEP” pairs and triplets e.g. PEP3:PEP1, PEP5:PEP12, or PEP7:PEP5:PEP1, useful for inducing the conversion of a neoplastic cell into a cell (any cell) of the blood cell lineage, are as already defined herein to the extent that PEP1, PEP3, PEP5, PEP7, PEP9, PEP11 and PEP12 are particularly useful for these applications as defined in the present blood section.

[0577] In certain embodiments useful for inducing the conversion of a neoplastic cell into a cell (any cell) of the blood cell lineage, said GFR-binding compound is a synthetic molecule as defined herein in the definition section.

[0578] In certain embodiments useful for inducing the conversion of a neoplastic cell into a cell (any cell) of the blood cell lineage, said GFR-binding compound is a synthetic peptide, or a variant or analog thereof, or a peptidomimetic.

### Adipocyte Cell Lineage

[0579] Certain embodiments of the invention are particularly useful for inducing the conversion of a neoplastic cell into a cell (any cell) of the adipocyte lineage.

[0580] In certain embodiments useful for inducing the conversion of a neoplastic cell into a cell (any cell) of the adipocyte lineage, PEP1 is SAIS (SEQ ID NO: 13570) or NAIS (SEQ ID NO: 13567).

[0581] In certain embodiments useful for inducing the conversion of a neoplastic cell into a cell (any cell) of the adipocyte lineage, PEP3 is selected from the group consisting of VPT, VPE, APT, TPT, VPA, APV, VPQ and VSQ.

[0582] In certain embodiments useful for inducing the conversion of a neoplastic cell into a cell (any cell) of the adipocyte lineage, PEP5 is a peptide of general formula PEP3-AA¹¹-AA¹²; wherein PEP3 is selected from the group consisting of VPT, VPE, APT, TPT, VPA, APV, VPQ and VSQ; wherein AA¹¹ is selected from the group consisting of E, K, Q, R, A, D, G and H, in particular is selected from the group consisting of E, K, Q, R, A and D; wherein AA¹² is selected from the group consisting of L, M, T, E, Q and H, in particular selected from the group consisting of L, M and T. In one particular example, PEP5 is selected from the group consisting of VPTEL (SEQ ID NO: 13631), VPEKM (SEQ ID NO: 13616), APTKL (SEQ ID NO: 13579), APTQL (SEQ ID NO: 13582), VPTKL (SEQ ID NO: 13633), TPTKM (SEQ ID NO: 13598), VPARL (SEQ ID NO: 13611), VPTRL (SEQ ID NO: 13637), APVKT (SEQ ID NO: 13589), VPQAL (SEQ ID NO: 13620), VSQDL (SEQ ID NO: 13639) and VPQDL (SEQ ID NO: 13621).

[0583] In certain embodiments useful for inducing the conversion of a neoplastic cell into a cell (any cell) of the adipocyte lineage, PEP7 is an amino acid or a peptide with between two and seven amino acids of general formula AA¹-AA²-AA³-AA⁴-AA⁵-AA⁶-AA⁷ (SEQ ID NO: 13816); wherein AA¹, AA², AA³, AA⁴, and AA⁵ are independently absent or AA^{I} as defined herein; wherein AA⁶ is absent or selected from the group consisting of S, T, C, E, Q, P and R, preferably is selected from the group consisting of C, S and T; wherein AA⁷ is absent or is selected from the group consisting of S, T, C, E, Q, P and R, preferably is C or S; and wherein at least one of AA¹, AA², AA³, AA⁴, AA⁵, AA⁶ or AA⁷ is not absent. In one particular example, PEP7 is selected from the group consisting of KIPKAXX (SEQ ID NO: 13655), GIPEPXX (SEQ ID NO: 13650), SIPKAXX (SEQ ID NO: 13660), HVTKPTX (SEQ ID NO: 13653), YVPKPXX (SEQ ID NO: 13664), TVPKPXX (SEQ ID NO: 13663), AVPKAXX (SEQ ID NO: 13649), KVGKAXX (SEQ ID NO: 13656), KASKAXX (SEQ ID NO: 13654), GSAGPXX (SEQ ID NO: 13651), AAPASXX (SEQ ID NO: 13646), STPPTXX (SEQ ID NO: 13662), HVPKPXX (SEQ ID NO: 13652), RVPSTXX (SEQ ID NO: 13659), ASAAPXX (SEQ ID NO: 13647) and ASASPXX (SEQ ID NO: 13648).

[0584] In certain embodiments useful for inducing the conversion of a neoplastic cell into a cell (any cell) of the adipocyte lineage, PEP9 is a peptide of general formula AA¹-AA²-AA³-AA⁴-AA⁵-AA⁶-AA⁷-PEP5; wherein PEP5 is a peptide of formula PEP3-AA¹¹-AA¹²; wherein PEP3 is selected from the group consisting of VPT, VPE, APT, TPT, VPA, APV, VPQ and VSQ; wherein AA¹¹ is selected from the group consisting of E, K, Q, R, A, D, G and H, in particular E, K, Q, R, A and D; wherein AA¹² is selected from the group consisting of L, M, T, E, Q and H, in particular selected from the group consisting of L, M and T; wherein AA¹, AA², AA³, AA⁴, and AA⁵ are independently absent or AA^{I} as defined herein; wherein AA⁶ is absent or selected from the group consisting of S, T, C, E, Q, P and R, preferably is selected from the group consisting of C, S and T; wherein AA⁷ is selected from the group consisting of S, T, C, E, Q, P and R, preferably is C or S. In one particular example, PEP9 is selected from the group consisting of KIPKAXXVPTEL (SEQ ID NO: 13745), GIPEPXXVPEKM (SEQ ID NO: 13701), SIPKAXXVPTEL (SEQ ID NO: 13773), HVTKPTXAPTKL (SEQ ID NO: 13721), YVPKPXXAPTKL (SEQ ID NO: 13793), TVPKPXXAPTQL (SEQ ID NO: 13785), AVPKAXXAPTKL (SEQ ID NO: 13689), KVGKAXXVPTKL (SEQ ID NO: 13753), KASKAXXVPTKL (SEQ ID NO: 13737), GSAGPXXTPTKM (SEQ ID NO: 13707), AAPASXXVPARL (SEQ ID NO: 13668), STPPTXXVPTRL (SEQ ID NO: 13783), HVPKPXXAPTKL (SEQ ID NO: 13713), RVPSTXXAPVKT (SEQ ID NO: 13760), ASAAPXXVPQAL (SEQ ID NO: 13678), ASASPXXVSQDL (SEQ ID NO: 13688) and ASASPXXVPQDL (SEQ ID NO: 13686).

[0585] In certain embodiments useful for inducing the conversion of a neoplastic cell into a cell (any cell) of the adipocyte lineage, PEP12 is a peptide of general formula PEP1-AA¹⁷-PEP11; wherein AA¹⁷ is selected from the group consisting of G, A, V, L, I, P, F, M, W, T and S (in particular is selected from the group consisting of M, V and T); wherein PEP1 is SAIS (SEQ ID NO: 13570) or NAIS (SEQ ID NO: 13567).

[0586] In certain embodiments useful for inducing the conversion of a neoplastic cell into a cell (any cell) of the adipocyte lineage, PEP11 is a peptide with 3 amino acids of general formula AA¹⁸-AA¹⁹-AA²⁰; wherein AA¹⁸ is selected from the group consisting of L, V, Q, A and R, in particular is L; wherein AA¹⁹ is selected from the group consisting of F, W, H and Y (in particular is a polar aromatic amino acid such as Y); wherein AA²⁰ is selected from the group consisting of L, F, Y, K, I, V and M, in particular is L or F. In one particular example, PEP11 is LYL or LYF.

[0587] In certain embodiments useful for inducing the conversion of a neoplastic cell into a cell (any cell) of the adipocyte lineage, PEP1 is SAIS (SEQ ID NO: 13570) or NAIS (SEQ ID NO: 13567); PEP11 is LYL or LYF; and the pair PEP1:PEP11 is SAIS (SEQ ID NO: 13570):LYL or NAIS (SEQ ID NO: 13567):LYF.

[0588] The definitions of “PEP” pairs and triplets e.g. PEP3:PEP1, PEP5:PEP12, or PEP7:PEP5:PEP1, useful for inducing the conversion of a neoplastic cell into a cell (any cell) of the adipocyte lineage, are as already defined herein to the extent that PEP1, PEP3, PEP5, PEP7, PEP9, PEP11 and PEP12 are particularly useful for these applications as defined in the present adipose tissue section.

[0589] In certain embodiments useful for inducing the conversion of a neoplastic cell into a cell (any cell) of the adipocyte lineage, said GFR-binding compound is a synthetic molecule as defined herein in the definition section.

[0590] In certain embodiments useful for inducing the conversion of a neoplastic cell into a cell (any cell) of the adipocyte lineage, said GFR-binding compound is a synthetic peptide, or a variant or analog thereof, or a peptidomimetic.

### III. Bioactive Carriers

[0591] The present invention achieves its intended therapeutic action(s) i.e. the treatment of a neoplastic disease via extracellular, non-mutagenic, recoding or conversion of neoplastic cells, by functional combination (or association) of at least two bioactive substances, namely, a GFR-binding compound (e.g. non-cyclic or cyclic) as described above and a bioactive carrier.

[0592] In one example, said GFR-binding compound and said bioactive carrier are thus operably associated, combined, linked or connected as defined herein and thus form a pharmaceutical association or combination for uses and methods of the present invention.

[0593] In one aspect, the present disclosure provides a bioactive carrier, as part of a pharmaceutical association as defined herein, as an active principle for use in methods and uses described herein.

[0594] Suitable bioactive carriers for implementing embodiments of the invention include any substance (i) which can interact and/or be compatible with a biological system and (ii) participate to the intended biological activity of a treatment as described in the present application.

[0595] As may be used herein, the term “bioactive carrier”, “biocompatible carrier”, “bioactive material”, “biocompatible material”, “bioactive substance”, “bio-substance”, “biocompatible substance”, are used interchangeably.

[0596] A suitable bioactive carrier is compatible with living cells, tissues, organs or systems posing little to no risk of injury, toxicity or rejection by the immune system. Bioactive carriers suitable for implementing embodiments of the present invention include, but are not limited to, (a) a biopolymer such as (a1) collagen, (a2) fibrin; (b) a synthetic polymer such as (b1) ultra-high molecular weight polyethylene (UHMWPE), (b2) polyurethane (PE), (b3) polyurethane (PU), (b4) polytetrafuoroethylene (PTFE), (b5) polyacetal (PA), (b6) polymethylmethacrylate (PMMA), (b7) polyethylene terepthalate (PET), (b8) silicone rubber (SR), (b9) polyetheretherketone (PEEK), (b10) poly(lactic acid) (PLA), (b11) polysulfone (PS), (b12) PLLA, (b13) PLGA or (b14) PLDA; (c) metals and metal oxides such as (c1) gold and gold alloys, (c2) silver and silver alloys, (c3) platinum and platinum alloys, (c4) tantalum, (c5) Ti6Al4V, (c6) 316L stainless steel, (c7) Co—Cr Alloys, (c8) titanium alloys such as such as α-type, β-type, α+β-type Ti alloy, Ti—Nb alloys such as Ti29Nb13Ta4.6Zr or Ti35Nb4Sn); (d) metallic glasses; (e) amorphous alloys such as Zr-based alloys; (f) porous metals such as the ones reported in Ryan et al., 2006, Biomaterials, 27, 2651; Lopez-Heredia et al. 2008, Biomaterials, 29, 2608; Ryan et al., 2008, Biomaterials, 29, 3625; Li et al., 2007, Biomaterials, 28, 2810; or Hollander et al., 2006, Biomaterials, 27, 955; all being incorporated herein in their entirety; (g) gel or solid ceramics such as (g1) alumina, (g2) zirconia, (g3) carbon, (g4) titania, (g5) bioglass, or (g6) hydroxyapatite (HA); (h) composites such as (h1) silica/SR, (h2) CF/UHMWPE, (h3) CF/PTFE, (h4) HA/PE, (h5) CF/epoxy, (h6) CF/PEEK, (h7) CF/C or (h8) Al₂O₃/PTFE; (i) hydrogels such as (i1) polyisocyanopeptide hydrogels such as oligo(ethylene)glycol polyisocyanopeptides as described, for instance, in Van Buul, et al.; Chem. Sci. 4, 2357-2363 (2013), incorporated herein by reference in its entirety, (i2) polysaccharides such as alginates, chitosans, chitins, guar gums, pectins, gellan gums, heparins, carrageenans, hyaluronans, starches, agars, xanthan gums, methylcellulose, carboxymethylcellulose, hydroxypropyl methyl cellulose, (i3) polyglycols such as polyethyleneglycol or polypropyleneglycol, (i4) polyvinylpyrrolidone, (i5) poly(vinylalcohol), (i6) polyacrylic acids, (i7) glycerophosphates, (i8) 2-acrylamido-2-methylpropanesulfonic acid, (i9) polyphosphazenes; (j) other suitable materials such as demineralized bone matrix; and any combinations thereof.

[0597] Suitable sources of bioactive carriers for implementing embodiments of the present invention include, but are not limited to, autographs, allographs, xenographs, plants, solutions, excipients, ceramics, metals, metal alloys, organic and inorganic polymers, bioglasses, carbon-containing structures, or combination thereof.

[0598] Particularly suitable as bioactive carriers for implementing embodiments of the present invention include bioactive carriers comprising at least one naturally occurring hydroxyl group on at least one surface thereof and bioactive carriers which do not naturally comprise at least one hydroxyl group on a surface thereof but which have been modified using conventional surface treatment techniques such that at least one hydroxyl group is present on a surface of the bioactive carrier. In one example, said hydroxyl group is an available hydroxyl group i.e. it is not prevented from interacting and/or reacting with a compound of the present disclosure. Suitable as bioactive carriers naturally containing hydroxyl groups on a surface thereof for implementing embodiments of the invention specifically include metal oxides such as titanium oxides and non-metal oxides such ceramics. Also suitable as bioactive carriers for implementing embodiments of the invention include bioactive carriers comprising at least one naturally occurring carboxylate group (—COOH) or amine group (—NH₂) on at least one of a surface thereof and bioactive carriers which do not naturally comprise at least one carboxylate group (—COOH) or amine group (—NH₂) onto a surface thereof but which have been modified using conventional surface treatment techniques such that at least one carboxylate group (—COOH) or amine group (—NH₂) is present on a surface of the bioactive carrier.

[0599] In one example, said bioactive carrier includes a biomaterial. Suitable biomaterials for implementing certain embodiments of the present disclosure may be derived from nature or synthesized in the laboratory using a variety of chemical approaches utilizing metallic components, polymers, ceramics or composite materials. They are often used and/or adapted for a medical application, and thus comprise whole or part of a living structure or biomedical device. Suitable biomaterials for implementing certain embodiments of the present disclosure are commonly used in joint replacements, bone plates, bone cement, artificial ligaments and tendons, dental implants for tooth fixation, blood vessel prostheses, heart valves, skin repair devices (artificial tissue), cochlear replacements, contact lenses, breast implants, drug delivery mechanisms, sustainable materials, vascular grafts, stents, nerve conduits. Particularly suitable biomaterials for implementing certain embodiments of the present disclosure such as metals and alloys (pages 94-95), ceramics (pages 95-97), polymeric biomaterials (pages 97-98) and biocomposite materials (pages 98-99) are described in Nitesh et al., International Journal of Emerging Technology and Advanced Engineering, ISSN 2250-2459, Volume 2, Issue 4, 2012, which is herein incorporated by reference in its entirety.

[0600] In one particular example, said bioactive carrier is a biomaterial.

[0601] In certain embodiments, particularly suitable bioactive carriers are selected from the group consisting of bioinert biomaterials, bioactive biomaterials and bioresorbable biomaterials.

[0602] The nature of the biomaterial is an important parameter. Particularly good results have been obtained using bioactive carriers composed mostly with the main material component of the tissue where the cells need to be recoded. For example, it was discovered that particularly good results may be obtained when a solid ceramic component (granulated ceramic powder or ceramic scaffolds) or a gel ceramic component is used in combination of a GFR-binding peptide of the present disclosure to recode osteosarcoma cells and thus protect from bone cancers. For example, it was also discovered that particularly good results may be obtained when collagen, in particular collagen types I, II, III and XI, is used in combination of a GFR-binding peptide of the present disclosure to recode chondrosarcomas and thus protect from cartilage cancers. For example, it was also discovered that particularly good results may be obtained when collagen, in particular collagen types I and III, or a biodegradable hydrogel is used in combination with a GFR-binding peptide of the present disclosure to recode disfunctioning muscle, skin, tendon and ligament cells. For example, it was also discovered that particularly good results may be obtained when a collagen or a biodegradable hydrogel is used in combination with a GFR-binding peptide of the present disclosure to recode cells and/or restore functions of vascular, neuron, eye retina, renal, wound healing, hair, fertility and reproduction, lung, and adipose tissues.

[0603] Bioinert biomaterials: As used herein, unless indicated otherwise or contradictory in context, the term “bioinert biomaterials” refers to any material that once placed in the human body has minimal interaction with its surrounding tissue. Examples of these are stainless steel, titanium, alumina, partially stabilised zirconia, and ultra-high molecular weight polyethylene. Generally a fibrous capsule might form around bioinert implants hence its biofunctionality relies on tissue integration through the implant.

[0604] Bioactive biomaterial: As used herein, unless indicated otherwise or contradictory in context, the term “bioactive biomaterial” refers to a material which, upon being placed within the human body, interacts with the surrounding bone and in some cases, even soft tissue. This occurs through a time-dependent kinetic modification of the surface, triggered by their implantation within the living bone. An ion-exchange reaction between the bioactive implant and surrounding body fluids, results in the formation of a biologically active carbonate apatite (CHAp) layer on the implant that is chemically and crystallographically equivalent to the mineral phase in bone. Examples of these materials are synthetic hydroxyapatite [Ca₁₀(PO₄)₆(OH)₂], glass ceramic A-W and Bioglass®.

[0605] Bioresorbable Biomaterials: As used herein, unless indicated otherwise or contradictory in context, the term “bioresorbable biomaterials” refers to a material which, upon placement within the human body, starts to dissolve (resorbed) and slowly replaced by advancing tissue (such as bone). Examples of bioresorbable materials include, but are not limited to, tricalcium phosphate [Ca₃(PO₄)₂], polylactic-polyglycolic acid copolymers, calcium oxide, calcium carbonate and gypsum.

[0606] Therefore, no particular limitation should be ascribed to the substance, material or molecule suitable as being bioactive carriers for implementing embodiments of the present invention insofar as said substance, material or molecule is (a) biocompatible as defined herein and (b) combinable or associable with a GFR-binding compound as defined herein. In one preferred example, said bioactive carrier has a stiffness of at least 5 kPa, more preferably at least 35 kPa and preferably not more than 3 or 5 GPa as measured using conventional Dynamic Mechanical Analysis such as described in details in Gong J P et al., Double-network hydrogels with extremely high mechanical strength, Adv Mater 2003, 15(14), 1155e8, which is incorporated herein by reference.

[0607] In one particular example, a biomaterial as defined herein for use in neuron-related applications has a stiffness comprised between about 0.01 kPa and about 3 kPa, preferably between about 0.01 kPa and about 1 kPa. In one particular example, a biomaterial as defined herein for use in muscle, cartilage and tendon/ligament-related applications has a stiffness comprised between about 3 kPa and about 200 kPa, preferably between about 10 kPa and about 30 kPa. In one particular example, a biomaterial as defined herein for use in bone-related applications has a stiffness comprised between about 30 kPa and about 2 GPa, preferably between about 70 kPa and about 200 kPa. In one particular example, a biomaterial as defined herein for use in hair-related applications has a stiffness comprised between about 0.01 kPa and about 200 kPa, preferably between about 3 kPa and about 70 kPa. In one particular example, a biomaterial as defined herein for use in endothelization-related applications has a stiffness comprised between about 0.01 kPa and about 500 kPa. In one particular example, a biomaterial as defined herein for use in angiogenesis-related applications has a stiffness comprised between about 0.5 kPa and about 100 kPa. In one particular example, a biomaterial as defined herein for use in wound healing and skin-related applications has a stiffness comprised between about 0.01 kPa and about 70 kPa.

[0608] Available hydroxyl groups: As used herein, unless indicated otherwise or contradictory in context, the term “free hydroxyl” or “available hydroxyl” means an hydroxyl group, which may be —OH or a radical (—O⁻) or an anion (—O⁻) fully or partially ionised, which is able to/free to act as a nucleophile in a reaction with an electrophile such as compound (A) or compound (B) defined below.

[0609] Available hydroxyl-containing surface: As used herein, unless indicated otherwise or contradictory in context, the term “available hydroxyl-containing surface” or “free hydroxyl-containing surface” means a surface containing at least one free or available hydroxyl group as defined herein.

[0610] Ceramics: As used herein, unless indicated otherwise or contradictory in context, the term “ceramic” refers to an inorganic material with a high melting point, above 1000° C. Most typically, materials referred to as “ceramics” are obtained by a process in which raw material solid particles are heated in order to sinter them. Materials referred to as “ceramics” may broadly be split into two groups, these being “oxide ceramics” and “non-oxide ceramics”. “Oxide ceramics” include, but are not limited to, alkaline earth oxides such as MgO and BaO, Al₂O₃ and aluminates, TiO₂ and titanates, ZrO₂ and zirconates, silicates such as clays and clay-derived materials. Since the term “ceramics” may encompass crystalline, partially amorphous and fully amorphous materials, the term “oxide ceramics” may also be interpreted as covering fully amorphous silicate glasses. “Non-oxide ceramics” include, but are not limited to, carbides and nitrides, and also borides and silicides, for example silicon carbide and silicon nitride, and also metal carbides and nitrides. In one particular example, solid ceramics e.g. in granulated powder or as a scaffold, is used as a bioactive carrier in the meaning of the present disclosure in bone-related applications. In one particular example, gel ceramics is used as a bioactive carrier in the meaning of the present disclosure in bone-related applications.

[0611] Metal oxides: As used herein, unless indicated otherwise or contradictory in context, the term “metal oxide” means a chemical compound that contains at least one oxygen atom and one other element in its chemical formula. Metal oxides typically contain an anion of oxygen in the oxidation state of −2. They can be obtained by hydrolysis or air/oxygen oxidation. Examples of such metal oxides are titanium oxides (e.g. TiO, Ti₂O₃, TiO₂), silicon oxide (SiO₂), aluminum oxide (Al₂O₃), iron (II, III) oxides such as Fe₂O₃, and zinc oxide (ZnO).

[0612] Biopolymer: As used herein, unless indicated otherwise or contradictory in context, the term “biopolymer” refers to a polymer produced by living organisms and includes, but is not limited to, polypeptides and proteins (such as collagen and fibrin), polysaccharides (such as cellulose, starch, chitin and chitosan), nucleic acids (such as DNA and RNA), and hydrides thereof.

[0613] Hydrogel: As used herein, unless indicated otherwise or contradictory in context, the term “hydrogel” refers to “Hydrogel” refers to a class of polymeric materials which are swollen in an aqueous medium, but which do not dissolve in water. Hydrogels are highly absorbent (they can contain over 99% water) natural or synthetic polymers. Hydrogels also possess a degree of flexibility very similar to natural tissue, due to their significant water content. U.S. Pat. No. 6,475,516, for example, provides hydrogels being covalently bound to the surface of an in-dwelling medical device such as an implant, which may be functionalized with a GFR-binding compound of the present disclosure using, for instance, a process as described herein. In one particular example, biodegradable hydrogels are used as bioactive carriers in the meaning of the present disclosure.

[0614] Collagen: As used herein, unless indicated otherwise or contradictory in context, the term “collagen” refers to the main structural protein of the various connective tissues in animals which is mostly found in fibrous tissues such as tendons, ligaments and skin, and is also abundant in corneas, cartilage, bones, blood vessels, the gut, and intervertebral discs. Collagen is typically composed of a triple helix and generally contains high hydroxyproline content. The most common motifs in its amino acid sequence glycine-proline-X and glycine-X-hydroxyproline, where X is any amino acid other than glycine, proline or hydroxyproline. 28 types of collagen have been identified and described in the literature, which are all presently contemplated to be suitable for implementing embodiments of the invention. The five most common types are: Collagen I which may be found in skin, tendon, vascular ligature, organs, bone (main component of the organic part of bone); Collagen II which may be found in cartilage (main component of cartilage); Collagen III which may be found in reticulate (main component of reticular fibers); Collagen IV which may be found in the basal lamina, the epithelium-secreted layer of the basement membrane; Collagen V which may be found on cell surfaces, hair and placenta. For example, in certain embodiments, suitable collagens for implementing embodiments of the present invention particularly include collagen type-I and type-IV. In one particular example, collagen, in particular collagen types I, II, III and XI, is used as a bioactive carrier in the meaning of the present disclosure in cartilage-related applications. In one particular example, collagen, in particular collagen types I and III, is used as a bioactive carrier in the meaning of the present disclosure in muscle-related applications, skin-related applications, and T/L-related applications. In one particular example, any type of collagen is used as a bioactive carrier in the meaning of the present disclosure in vascular, neuron, eye retina, renal, wound healing, hair, fertility and reproduction, lung, adipose-related applications.

[0615] In certain embodiments, said association, combination, linkage or connection between said GFR-binding compound and a bioactive carrier may occur via a bioactive carrier-affinity-containing group as defined herein.

### IV. Bioactive Carrier-Affinity-Containing Group

[0616] In certain embodiments, said GFR-binding compound as already defined herein is modified or functionalised with at least one bioactive carrier-affinity-containing group. Said at least one bioactive carrier-affinity-containing group provides said GFR-binding compound with an ability to, covalently or non-covalently, interact with, or be connected to, a bioactive carrier as defined herein (in particular, a biomaterial as defined herein).

[0617] In such embodiments where affinity is required via covalent interaction or binding, said bioactive carrier-affinity-containing group may be a thiol (SH)-containing group or a cysteine-containing group, in particular, a thiol (SH)-containing peptide or a cysteine-containing peptide. In such embodiments where affinity is required via covalent interaction or binding, said bioactive carrier-affinity-containing group may particularly be a cysteine.

[0618] In such embodiments where affinity is required via non-covalent interaction or binding, said bioactive carrier-affinity-containing group may comprise (or be) a peptide group such as any one of the peptide groups disclosed in US patent application No. 2008/0268015 A1, which is hereby incorporated by reference in its entirety. In particular, peptides containing amino acid sequences rich in large aromatic amino acid residues (aromatic amino acid-containing peptides or peptidomimetics) that include one or more of Phe, Trp, Tyr such as sequence number 1 to 45 described in US 2008/0268015 A1 are suitable as a biomaterial-affinity-containing fragment for implementing embodiments of the present invention. Said fragment may also be a peptide fragment such as any one of the peptide fragments disclosed in U.S. Pat. No. 6,818,620 B2, which is hereby incorporated by reference in its entirety. In particular, peptides of sequence number 1 to 7 described in U.S. Pat. No. 6,818,620 B2 are suitable as a biomaterial-affinity-containing fragment for implementing embodiments of the present invention. Thus, said biomaterial affinity-containing group may be a peptide with 3 to 25 amino acids comprising one or more of Phe, Trp or Tyr.

[0619] In one particular example, said bioactive carrier-affinity-containing group is a bioactive carrier high-affinity-containing group such as a biomaterial high-affinity-containing group.

[0620] In certain embodiments, said bioactive carrier-affinity-containing group has some affinity (preferably high affinity) with a given bioactive carrier (in particular, a biomaterial) such as collagen, apatite, titanium or any of those listed in e.g. US patent application No. 2008/0268015 A1, which is incorporated herein by reference. For instance, a group having some affinity with a biomaterial is any group capable to non-covalently interact/bind to a biomaterial with an affinity/specificity selected from at least 10%, at least 20%, at least 30%, at least 40%, at least 50%, at least 60%, at least 70%, at least 80%, at least 90%, at least 100%, at least 200%, at least 300%, at least 400%, at least 500%, or a higher percentage, with respect to an affinity where said group binds to an appropriate control such as, for example, a different material or surface, or a protein typically used for such comparisons such as bovine serum albumin. In one example, a biomaterial-affinity-containing group has a binding specificity that is characterized by a relative binding affinity as measured by an EC50 of 10 μM or less, and in certain embodiments, less than 1 μM. In certain embodiments, a relative affinity comprised between 1 μM and 100 PM, between 1 μM and 10 PM, or between 1 μM and 1 μM is particularly suitable. The EC50 is determined using any number of methods known in the art. In this case, the EC50 represents the concentration of fragment producing 50% of the maximal binding observed for that fragment in the assay.

[0621] In one particular example, said bioactive carrier-affinity-containing group is selected from the group consisting of GTPGP, which may preferably non-covalently interact with a bioactive carrier such as an apatite, and WWFWG, which may preferably non-covalently interact with a bioactive carrier such as a collagen.

[0622] In one particular example, said bioactive carrier-affinity-containing group is covalently or non-covalently (in particular, covalently) attached at an end (or extremity) of said GFR-binding compound.

### V. Modified Non-Cyclic GFR-Binding Compound

[0623] Thus, in one aspect, the present disclosure provides a pharmaceutical association or combination comprising a modified (non-cyclic) GFR-binding compound and a bioactive carrier, wherein said modified (non-cyclic) GFR-binding compound comprises a (non-cyclic) GFR-binding compound as defined in the present disclosure and a bioactive carrier-affinity-containing group also as defined herein.

[0624] For example, in certain embodiments, said modified GFR-binding compound comprises a GFR-binding compound as defined in the present disclosure and a bioactive carrier-affinity-containing group; wherein said bioactive carrier-affinity-containing group is selected from the group consisting of a thiol-containing group (in particular, a thiol-containing peptide), a cysteine-containing group (in particular, a cysteine-containing peptide and more particularly, a cysteine), and an aromatic amino acid-containing peptide or peptidomimetic.

[0625] For example, in certain embodiments, said modified GFR-binding compound comprises a GFR-binding compound and a bioactive carrier-affinity-containing group; wherein said GFR-binding compound is a peptide, a variant or analog thereof, or a peptidomimetic as defined herein, with (comprising, or exclusively consisting of, or constituted of) between 8-30 amino acids, in particular between 8-25 amino acids or between 8-22 amino acids, more particularly between 18-22 amino acids, even more particularly between 19-21 or 20, comprising a peptide with four amino acids (PEP1) selected from the group consisting of SAIS (SEQ ID NO: 13570), SSLS (SEQ ID NO: 13575), NAIS (SEQ ID NO: 13567), SATS (SEQ ID NO: 13571), SPIS (SEQ ID NO: 13574), EPIS (SEQ ID NO: 13563), SPIN (SEQ ID NO: 13573), KPLS (SEQ ID NO: 13566), EPLP (SEQ ID NO: 13564), EPLT (SEQ ID NO: 13565), SNIT (SEQ ID NO: 13572), RSVK (SEQ ID NO: 13569) and RPVQ (SEQ ID NO: 13568); wherein said bioactive carrier-affinity-containing group is selected from the group consisting of a thiol-containing group (in particular, a thiol-containing peptide), a cysteine-containing group (in particular, a cysteine-containing peptide and more particularly, a cysteine), and an aromatic amino acid-containing peptide or peptidomimetic.

[0626] For example, in certain embodiments, said modified GFR-binding compound comprises a GFR-binding compound and a bioactive carrier-affinity-containing group; wherein said GFR-binding compound is a peptide, a variant or analog thereof, or a peptidomimetic as defined herein, with (comprising, or exclusively consisting of, or constituted of) between 8-30 amino acids, in particular between 8-25 amino acids or between 8-22 amino acids, more particularly between 18-22 amino acids, even more particularly between 19-21 or 20, comprising a peptide with height amino acids of general formula (PEP12): PEP1-AA¹⁷-PEP11; wherein PEP1 is a peptide with four amino acids selected from the group consisting of SAIS (SEQ ID NO: 13570), SSLS (SEQ ID NO: 13575), NAIS (SEQ ID NO: 13567), SATS (SEQ ID NO: 13571), SPIS (SEQ ID NO: 13574), EPIS (SEQ ID NO: 13563), SPIN (SEQ ID NO: 13573), KPLS (SEQ ID NO: 13566), EPLP (SEQ ID NO: 13564), EPLT (SEQ ID NO: 13565), SNIT (SEQ ID NO: 13572), RSVK (SEQ ID NO: 13569) and RPVQ (SEQ ID NO: 13568); wherein PEP11 is a peptide with 3 amino acids of formula AA¹⁸-AA¹⁹-AA²⁰; wherein AA¹⁷ is selected from the group consisting of G, A, V, L, I, P, F, M, W, T and S (in particular is selected from the group consisting of M, I, L, V and T); wherein AA¹⁸ is selected from the group consisting of L, V, Q, A and R; wherein AA¹⁹ is selected from the group consisting of F, W, H and Y (in particular is an aromatic, polar amino acid such as Y); wherein AA²⁰ is selected from the group consisting of L, F, Y, K, I, V and M; wherein said bioactive carrier-affinity-containing group is selected from the group consisting of a thiol-containing group (in particular, a thiol-containing peptide), a cysteine-containing group (in particular, a cysteine-containing peptide and more particularly, a cysteine), and an aromatic amino acid-containing peptide or peptidomimetic.

[0627] For example, in certain embodiments, said modified GFR-binding compound comprises a GFR-binding compound and a bioactive carrier-affinity-containing group; wherein said GFR-binding compound is a peptide, a variant or analog thereof, or a peptidomimetic as defined herein, with (comprising, or exclusively consisting of, or constituted of) between 8 and 30 (in particular between 8-25 or between 8-22, more particularly between 18-22, even more particularly between 19-21 or 20) amino acids, having the following general formula (I) (hereinafter may also be referred to as compound (1) or peptide (1)):

PEP(C)-PEP12 (I)

wherein PEP12 is a peptide with 8 amino acids of formula PEP1-AA¹⁷-PEP11 as defined herein; wherein one end of PEP(C) interacts covalently with PEP12 via one end of PEP1; wherein PEP(C) is a peptide with at least 5 amino acids, in particular a peptide with between 5 and 12 amino acids; wherein said bioactive carrier-affinity-containing group is selected from the group consisting of a thiol-containing group (in particular, a thiol-containing peptide), a cysteine-containing group (in particular, a cysteine-containing peptide and more particularly, a cysteine), and an aromatic amino acid-containing peptide or peptidomimetic.

[0628] For example, in certain embodiments, said modified GFR-binding compound comprises a GFR-binding compound and a bioactive carrier-affinity-containing group; wherein said GFR-binding compound is a peptide, a variant or analog thereof, or a peptidomimetic as defined herein, with (comprising, or exclusively consisting of, or constituted of) between 8 and 30 (in particular between 8-25 or between 8-22, more particularly between 18-22, even more particularly between 19-21 or 20) amino acids, having the following general formula (II) (hereinafter may also be referred to as compound (II) or peptide (II)):

PEP7-PEP5-PEP12 (II)

wherein PEP12 is a peptide with 8 amino acids of formula PEP1-AA¹⁷-PEP11 as defined herein; wherein PEP5 is a peptide with five amino acids as defined herein; wherein PEP7 is an amino acid or a peptide with between two and seven amino acids as defined herein; wherein one end of PEP5 interacts covalently with one end of PEP12 via one end of PEP1; wherein another end of PEP5 interacts covalently with one end of PEP7 via AA⁷; wherein said bioactive carrier-affinity-containing group is selected from the group consisting of a thiol-containing group (in particular, a thiol-containing peptide), a cysteine-containing group (in particular, a cysteine-containing peptide and more particularly, a cysteine), and an aromatic amino acid-containing peptide or peptidomimetic.

[0629] For example, in certain embodiments, said modified GFR-binding compound comprises a GFR-binding compound and a bioactive carrier-affinity-containing group; wherein said GFR-binding compound is a peptide, a variant or analog thereof, or a peptidomimetic as defined herein, with (comprising, or exclusively consisting of, or constituted of) between 8 and 30 (in particular between 8-25 or between 8-22, more particularly between 18-22, even more particularly between 19-21 or 20) amino acids, having the following general formula (III) (hereinafter may also be referred to as compound (III) or peptide (III)):

AA¹-AA²-AA³-AA⁴-AA⁵-AA⁶-AA⁷-AA⁸-AA⁹-AA¹⁰-AA¹¹-AA¹²-AA¹³-AA¹⁴-AA¹⁵-AA¹⁶-AA¹⁷-AA¹⁸-AA¹⁹-AA²⁰ (III)

wherein AA¹-AA²-AA³-AA⁴-AA⁵-AA⁶-AA⁷ (SEQ ID NO: 13816) is PEP7 as defined herein; wherein AA¹³-AA¹⁴-AA¹⁵-AA¹⁶-AA¹⁷-AA¹⁸-AA¹⁹-AA²⁰ is PEP12 as defined herein; wherein AA⁸-AA⁹-AA¹⁰ is PEP3 as defined herein; wherein AA¹¹ and AA¹² are as defined herein; wherein AA¹ may be an N-terminal amino acid or a C-terminal amino acid; wherein AA²⁰ may be an N-terminal amino acid or a C-terminal amino acid; wherein said bioactive carrier-affinity-containing group is selected from the group consisting of a thiol-containing group (in particular, a thiol-containing peptide), a cysteine-containing group (in particular, a cysteine-containing peptide and more particularly, a cysteine), and an aromatic amino acid-containing peptide or peptidomimetic.

[0630] In certain embodiments, said modified GFR-binding compound comprises a GFR-binding compound and a bioactive carrier-affinity-containing group; wherein the RMSD value of the three dimensional (3D) atomic coordinates of said GFR-binding compound with respect to PEPREF is 2.45 Å (Angstroms) or less, in particular is 2 Å or less, and more particularly is 1.79 Å or less, and wherein PEPREF is the set of 3D atomic coordinates already defined herein.

### VI. Modified Cyclic GFR-Binding Compound

[0631] Thus, in one aspect, the present disclosure provides a pharmaceutical association or combination comprising a modified cyclic GFR-binding compound and a bioactive carrier, wherein said modified cyclic GFR-binding compound comprises a cyclic GFR-binding compound as defined in the present disclosure and a bioactive carrier-affinity-containing group also as defined herein.

[0632] For example, in certain embodiments, said modified cyclic GFR-binding compound comprises a cyclic GFR-binding compound as defined in the present disclosure and a bioactive carrier-affinity-containing group; wherein said bioactive carrier-affinity-containing group is selected from the group consisting of a thiol-containing group (in particular, a thiol-containing peptide), a cysteine-containing group (in particular, a cysteine-containing peptide and more particularly, a cysteine), and an aromatic amino acid-containing peptide or peptidomimetic.

[0633] For example, in certain embodiments, the present disclosure provides a modified cyclic GFR-binding compound comprising a cyclic GFR-binding compound and a bioactive carrier-affinity-containing group; wherein said cyclic GFR-binding compound is a cyclic peptide, a variant or analog thereof, or a cyclic peptidomimetic as defined herein, with (comprising, or exclusively consisting of, or constituted of) between 10-60 (in particular between 15-60, more particularly between 10-55, and even more particularly between 15-55) amino acids or with between 10-35 (in particular between 15-35, more particularly between 10-30, and even more particularly between 15-30) amino acids; comprising a peptide with four amino acids (PEP1) selected from the group consisting of SAIS (SEQ ID NO: 13570), SSLS (SEQ ID NO: 13575), NAIS (SEQ ID NO: 13567), SATS (SEQ ID NO: 13571), SPIS (SEQ ID NO: 13574), EPIS (SEQ ID NO: 13563), SPIN (SEQ ID NO: 13573), KPLS (SEQ ID NO: 13566), EPLP (SEQ ID NO: 13564), EPLT (SEQ ID NO: 13565), SNIT (SEQ ID NO: 13572), RSVK (SEQ ID NO: 13569) and RPVQ (SEQ ID NO: 13568); wherein said bioactive carrier-affinity-containing group is selected from the group consisting of a thiol-containing group (in particular, a thiol-containing peptide), a cysteine-containing group (in particular, a cysteine-containing peptide and more particularly, a cysteine), and an aromatic amino acid-containing peptide or peptidomimetic.

[0634] For example, in certain embodiments, the present disclosure provides a modified cyclic GFR-binding compound comprising a cyclic GFR-binding compound and a bioactive carrier-affinity-containing group; wherein said cyclic GFR-binding compound is a cyclic peptide, a variant or analog thereof, or a cyclic peptidomimetic as defined herein, with (comprising, or exclusively consisting of, or constituted of) between 10-60 (in particular between 15-60, more particularly between 10-55, and even more particularly between 15-55) amino acids or with between 10-35 (in particular between 15-35, more particularly between 10-30, and even more particularly between 15-30) amino acids; comprising a peptide with height amino acids of general formula (PEP12): PEP1-AA¹⁷-PEP11; wherein PEP1 is a peptide with four amino acids selected from the group consisting of SAIS (SEQ ID NO: 13570), SSLS (SEQ ID NO: 13575), NAIS (SEQ ID NO: 13567), SATS (SEQ ID NO: 13571), SPIS (SEQ ID NO: 13574), EPIS (SEQ ID NO: 13563), SPIN (SEQ ID NO: 13573), KPLS (SEQ ID NO: 13566), EPLP (SEQ ID NO: 13564), EPLT (SEQ ID NO: 13565), SNIT (SEQ ID NO: 13572), RSVK (SEQ ID NO: 13569) and RPVQ (SEQ ID NO: 13568); wherein PEP11 is a peptide with 3 amino acids of formula AA¹⁸-AA¹⁹-AA²⁰; wherein AA¹⁷ is selected from the group consisting of G, A, V, L, I, P, F, M, W, T and S (in particular is selected from the group consisting of M, I, L, V and T); wherein AA¹⁸ is selected from the group consisting of L, V, Q, A and R; wherein AA¹⁹ is selected from the group consisting of F, W, H and Y (in particular is an aromatic, polar amino acid such as Y); wherein AA²⁰ is selected from the group consisting of L, F, Y, K, I, V and M; wherein said bioactive carrier-affinity-containing group is selected from the group consisting of a thiol-containing group (in particular, a thiol-containing peptide), a cysteine-containing group (in particular, a cysteine-containing peptide and more particularly, a cysteine), and an aromatic amino acid-containing peptide or peptidomimetic.

[0635] For example, in certain embodiments, the present disclosure provides a modified cyclic GFR-binding compound comprising a cyclic GFR-binding compound and a bioactive carrier-affinity-containing group, wherein said cyclic GFR-binding compound is a cyclic peptide, a variant or analog thereof, or a cyclic peptidomimetic as defined herein, with between 10-60 (in particular between 15-60, more particularly between 10-55, and even more particularly between 15-55) amino acids or with between 10-35 (in particular between 15-35, more particularly between 10-30, and even more particularly between 15-30) amino acids, comprising a peptide, a variant or analog thereof, or a peptidomimetic having the following general formula (IIIa):

PEP(A)-LINKER (IIIa)

wherein one end of LINKER interacts covalently with one end of PEP(A); wherein PEP(A) comprises PEP1 or PEP12; wherein LINKER is a linear or branched organic divalent radical, moiety or compound having a molecular weight (Mw) comprised between 450 and 4,500 Daltons, in particular comprised between about 600 and about 4,500 Da, more particularly between about 600 and about 4,000 Da, and even more particularly between about 600 and about 3,500 Da; wherein said bioactive carrier-affinity-containing group is selected from the group consisting of a thiol-containing group (in particular, a thiol-containing peptide), a cysteine-containing group (in particular, a cysteine-containing peptide and more particularly, a cysteine), and an aromatic amino acid-containing peptide or peptidomimetic.

[0636] For example, in certain embodiments, the present disclosure provides a modified cyclic GFR-binding compound comprising a cyclic GFR-binding compound and a bioactive carrier-affinity-containing group, wherein said cyclic GFR-binding compound is a cyclic peptide, a variant or analog thereof, or a cyclic peptidomimetic as defined herein, with between 10-60 (in particular between 15-60, more particularly between 10-55, and even more particularly between 15-55) amino acids or with between 10-35 (in particular between 15-35, more particularly between 10-30, and even more particularly between 15-30) amino acids, comprising a peptide, a variant or analog thereof, or a peptidomimetic having the following general formula (IIIb):

LINKER-PEP(A)-LINKER (IIIb)

wherein one end of a first LINKER interacts covalently with one end of PEP(A); wherein one end of a second LINKER interacts covalently with another end of PEP(A); wherein another end of a first LINKER interacts covalently with another end of a second LINKER; wherein PEP(A) comprises PEP1 or PEP12; wherein LINKER are independently a linear or branched organic divalent radical, moiety or compound having a molecular weight (Mw) comprised between 450 and 4,500 Daltons, in particular comprised between about 600 and about 4,500 Da, more particularly between about 600 and about 4,000 Da, and even more particularly between about 600 and about 3,500 Da; and wherein said bioactive carrier-affinity-containing group is selected from the group consisting of a thiol-containing group (in particular, a thiol-containing peptide), a cysteine-containing group (in particular, a cysteine-containing peptide and more particularly, a cysteine), and an aromatic amino acid-containing peptide or peptidomimetic.

[0637] For example, in certain embodiments, the present disclosure provides a modified cyclic GFR-binding compound comprising a cyclic GFR-binding compound and a bioactive carrier-affinity-containing group; wherein said cyclic GFR-binding compound is a cyclic peptide, a variant or analog thereof, or a cyclic peptidomimetic as defined herein, with between 10-35 (in particular between 15-35, more particularly between 10-30, and even more particularly between 15-30) amino acids, comprising a peptide, a variant or analog thereof, or a peptidomimetic having the following general formula (IVa):

PEP(C)-PEP12-LINKER (IVa)

wherein LINKER is a linear or branched organic divalent radical, moiety or compound having a molecular weight (Mw) comprised between 450 and 4,500 Daltons, in particular comprised between about 600 and about 4,500 Da, more particularly between about 600 and about 4,000 Da, and even more particularly between about 600 and about 3,500 Da; wherein PEP12 is a peptide with 8 amino acids of formula PEP1-AA¹⁷-PEP11 as defined herein; wherein PEP2 is a peptide with five amino acids as already defined herein; wherein one end of PEP(C) interacts covalently with PEP12 via one end of PEP1; wherein one end of LINKER interacts covalently with one end of PEP12 via one end of PEP11; wherein PEP(C) is a peptide with at least 5 amino acids, in particular a peptide with between 5 and 12 amino acids; and wherein said bioactive carrier-affinity-containing group is selected from the group consisting of a thiol-containing group (in particular, a thiol-containing peptide), a cysteine-containing group (in particular, a cysteine-containing peptide and more particularly, a cysteine), and an aromatic amino acid-containing peptide or peptidomimetic.

[0638] For example, in certain embodiments, the present disclosure provides a modified cyclic GFR-binding compound comprising a cyclic GFR-binding compound and a bioactive carrier-affinity-containing group; wherein said cyclic GFR-binding compound is a cyclic peptide, a variant or analog thereof, or a cyclic peptidomimetic as defined herein, with between 10-60 (in particular between 15-60, more particularly between 10-55, and even more particularly between 15-55) amino acids or with between 10-35 (in particular between 15-35, more particularly between 10-30, and even more particularly between 15-30) amino acids, comprising a peptide, a variant or analog thereof, or a peptidomimetic having the following general formula (IVb):

LINKER-PEP(C)-PEP12-LINKER (IVb)

wherein LINKER are independently a linear or branched organic divalent radical, moiety or compound having a molecular weight (Mw) comprised between 450 and 4,500 Daltons, in particular comprised between about 600 and about 4,500 Da, more particularly between about 600 and about 4,000 Da, and even more particularly between about 600 and about 3,500 Da; wherein PEP12 is a peptide with 8 amino acids of formula PEP1-AA¹⁷-PEP11 as defined herein; wherein PEP2 is a peptide with five amino acids as already defined herein; wherein one end of PEP(C) interacts covalently with PEP12 via one end of PEP1; wherein one end of a first LINKER interacts covalently with one end of PEP12 via one end of PEP11; wherein one end of a second LINKER interacts covalently with another end of PEP(C); wherein another end of a first LINKER interacts covalently with another end of a second LINKER; wherein PEP(C) is a peptide with at least 5 amino acids, in particular a peptide with between 5 and 12 amino acids; and wherein said bioactive carrier-affinity-containing group is selected from the group consisting of a thiol-containing group (in particular, a thiol-containing peptide), a cysteine-containing group (in particular, a cysteine-containing peptide and more particularly, a cysteine), and an aromatic amino acid-containing peptide or peptidomimetic.

[0639] For example, in certain embodiments, the present disclosure provides a modified cyclic GFR-binding compound comprising a cyclic GFR-binding compound and a bioactive carrier-affinity-containing group, wherein said cyclic GFR-binding compound is a cyclic peptide, a variant or analog thereof, or a cyclic peptidomimetic as defined herein, with between 10-35 (in particular between 15-35, more particularly between 10-30, and even more particularly between 15-30) amino acids, comprising a peptide, a variant or analog thereof, or a peptidomimetic having the following general formula (Va):

PEP7-PEP5-PEP12-LINKER (Va)

wherein LINKER is a linear or branched organic divalent radical, moiety or compound having a molecular weight (Mw) comprised between 450 and 4,500 Daltons, in particular comprised between about 600 and about 4,500 Da, more particularly between about 600 and about 4,000 Da, and even more particularly between about 600 and about 3,500 Da; wherein PEP12 is a peptide with 8 amino acids of formula PEP1-AA¹⁷-PEP11 as defined herein; wherein PEP5 is a peptide with five amino acids as already defined herein; wherein PEP7 an amino acid or a peptide with between two and seven amino acids as already defined herein; wherein one end of LINKER interacts covalently with one end of PEP12 via AA²⁰; wherein one end of PEP5 interacts covalently with another end of PEP12 via AA¹²; wherein another end of PEP5 interacts covalently with one end of PEP7 via AA⁸; and wherein said bioactive carrier-affinity-containing group is selected from the group consisting of a thiol-containing group (in particular, a thiol-containing peptide), a cysteine-containing group (in particular, a cysteine-containing peptide and more particularly, a cysteine), and an aromatic amino acid-containing peptide or peptidomimetic.

[0640] For example, in certain embodiments, the present disclosure provides a modified cyclic GFR-binding compound comprising a cyclic GFR-binding compound and a bioactive carrier-affinity-containing group, wherein said cyclic GFR-binding compound is a cyclic peptide, a variant or analog thereof, or a cyclic peptidomimetic as defined herein, with between 10-60 (in particular between 15-60, more particularly between 10-55, and even more particularly between 15-55) amino acids or with between 10-35 (in particular between 15-35, more particularly between 10-30, and even more particularly between 15-30) amino acids, comprising a peptide, a variant or analog thereof, or a peptidomimetic having the following general formula (Vb):

LINKER-PEP7-PEP5-PEP12-LINKER (Vb)

wherein LINKER are independently a linear or branched organic divalent radical, moiety or compound having a molecular weight (Mw) comprised between 450 and 4,500 Daltons, in particular comprised between about 600 and about 4,500 Da, more particularly between about 600 and about 4,000 Da, and even more particularly between about 600 and about 3,500 Da; wherein PEP12 is a peptide with 8 amino acids of formula PEP1-AA¹⁷-PEP11 as defined herein; wherein PEP5 is a peptide with five amino acids as already defined herein; wherein PEP7 an amino acid or a peptide with between two and seven amino acids as already defined herein; wherein one end of PEP5 interacts covalently with another end of PEP12 via AA¹²; wherein another end of PEP5 interacts covalently with one end of PEP7 via AA⁸; wherein one end of a first LINKER interacts covalently with one end of PEP12 via AA²⁰; wherein one end of a second LINKER interacts covalently with another end of PEP7; wherein another end of a first LINKER interacts covalently with another end of a second LINKER; and wherein said bioactive carrier-affinity-containing group is selected from the group consisting of a thiol-containing group (in particular, a thiol-containing peptide), a cysteine-containing group (in particular, a cysteine-containing peptide and more particularly, a cysteine), and an aromatic amino acid-containing peptide or peptidomimetic.

[0641] For example, in certain embodiments, the present disclosure provides a modified cyclic GFR-binding compound comprising a cyclic GFR-binding compound and a bioactive carrier-affinity-containing group, wherein said cyclic GFR-binding compound is a cyclic peptide, a variant or analog thereof, or a cyclic peptidomimetic as defined herein, with between 10-35 (in particular between 15-35, more particularly between 10-30, and even more particularly between 15-30) amino acids, comprising a peptide, a variant or analog thereof, or a peptidomimetic having the following general formula (VIa):

AA¹-AA²-AA³-AA⁴-AA⁵-AA⁶-AA⁷-AA⁸-AA⁹-AA¹⁰-AA¹¹-AA¹²-AA¹³-AA¹⁴-AA¹⁵-AA¹⁶-AA¹⁷-AA¹⁸-AA¹⁹-AA²⁰-LINKER (VIa)

wherein LINKER is a linear or branched organic divalent radical, moiety or compound having a molecular weight (Mw) comprised between 450 and 4,500 Daltons, in particular comprised between about 600 and about 4,500 Da, more particularly between about 600 and about 4,000 Da, and even more particularly between about 600 and about 3,500 Da; wherein AA¹-AA²-AA³-AA⁴-AA⁵-AA⁶-AA⁷ (SEQ ID NO: 13816) is PEP7 as defined herein; wherein AA¹³-AA¹⁴-AA¹⁵-AA¹⁶-AA¹⁷-AA¹⁸-AA¹⁹-AA²⁰ is PEP12 as defined herein; wherein AA⁸-AA⁹-AA¹⁰ is PEP3 as defined herein; wherein AA¹¹ and AA¹² are as defined herein; wherein one end of LINKER interacts covalently with AA²⁰; wherein AA¹ may be an N-terminal amino acid or a C-terminal amino acid; wherein AA²⁰ may be an N-terminal amino acid or a C-terminal amino acid; and wherein said bioactive carrier-affinity-containing group is selected from the group consisting of a thiol-containing group (in particular, a thiol-containing peptide), a cysteine-containing group (in particular, a cysteine-containing peptide and more particularly, a cysteine), and an aromatic amino acid-containing peptide or peptidomimetic.

[0642] For example, in certain embodiments, the present disclosure provides a modified cyclic GFR-binding compound comprising a cyclic GFR-binding compound and a bioactive carrier-affinity-containing group, wherein said cyclic GFR-binding compound is a cyclic peptide, a variant or analog thereof, or a cyclic peptidomimetic as defined herein, with between 10-60 (in particular between 15-60, more particularly between 10-55, and even more particularly between 15-55) amino acids or with between 10-35 (in particular between 15-35, more particularly between 10-30, and even more particularly between 15-30) amino acids, comprising a peptide, a variant or analog thereof, or a peptidomimetic having the following general formula (VIb) (hereinafter may also be referred to as compound (VIb) or peptide (VIb)):

LINKER-AA¹-AA²-AA³-AA⁴-AA⁵-AA⁶-AA⁷-AA⁸-AA⁹-AA¹⁰-AA¹¹-AA²-AA¹³-AA¹⁴-AA⁵-AA¹⁶-AA¹⁷-AA⁸-AA^{I}9-AA²⁰-LINKER (VIb)

wherein LINKER are independently a linear or branched organic divalent radical, moiety or compound having a molecular weight (Mw) comprised between 450 and 4,500 Daltons, in particular comprised between about 600 and about 4,500 Da, more particularly between about 600 and about 4,000 Da, and even more particularly between about 600 and about 3,500 Da; wherein AA¹-AA²-AA³-AA⁴-AA⁵-AA⁶-AA⁷ (SEQ ID NO: 13816) is PEP7 as defined herein; wherein AA¹³-AA¹⁴-AA¹⁵-AA¹⁶-AA¹⁷-AA¹⁸-AA¹⁹-AA²⁰ is PEP12 as defined herein; wherein AA⁸-AA⁹-AA¹⁰ is PEP3 as defined herein; wherein AA¹¹ and AA¹² are as defined herein; wherein one end of a first LINKER interacts covalently with AA²⁰; wherein one end of a second LINKER interacts covalently with AA¹; wherein another end of a first LINKER interacts covalently with another end of a second LINKER; wherein one end of the first LINKER may be an N-terminal amino acid or a C-terminal amino acid; and wherein said bioactive carrier-affinity-containing group is selected from the group consisting of a thiol-containing group (in particular, a thiol-containing peptide), a cysteine-containing group (in particular, a cysteine-containing peptide and more particularly, a cysteine), and an aromatic amino acid-containing peptide or peptidomimetic.

[0643] In one particular example, said bioactive carrier-affinity-containing group is comprised within said cyclic GFR-binding compound e.g. is comprised in at least one LINKER, or is at least one LINKER. For example, in certain embodiments, said modified cyclic GFR-binding compound may have any one of the following general schematic formulae:

[chemical structure]

[chemical structure]

wherein curved lines represents covalent bonds between LINKER, PEP3, PEP5, PEP12 and AAs “boxes”. Curved lines' lengths may not be representative of the actual relative distance between the LINKER, PEP3, PEP5, PEP12 and AAs.

### VII. Pharmaceutical Associations or Combinations

[0644] In one aspect, the present disclosure provides a pharmaceutical association or combination, which may be used for converting or recoding, in-vitro, ex-vivo or in-vivo, a neoplastic cell into a non-neoplastic cell, comprising at least one (modified) GFR-binding compound and a bioactive carrier, both as defined in the present disclosure. In one example, said (modified) GFR-binding compound and bioactive carrier are both active principles/ingredients. In one example, said GFR-binding compound and bioactive carrier are functionally associated/combined as defined herein. In certain embodiments, said pharmaceutical association or combination is a modified, functionalised, coated or grafted biomaterial as defined herein.

[0645] The present pharmaceutical associations or combinations may thus also be used for protecting a subject carrying a neoplastic cell from a neoplastic disease.

[0646] In one aspect, the present disclosure provides a pharmaceutical association or combination for the uses disclosed herein, substantially free from any cell adhesion promoter. As used herein, the term “substantially free”, as applied to a given component such as a cell adhesion promoter, means that the amount of such a component is less than 20%, 15%, 10%, 5%, 1%, 0.5%, 0.1% or less in mole with respect to the mole content of (modified) GFR-binding compound unless otherwise indicated, self-evident or contradictory in context.

[0647] In one aspect, the present disclosure provides a pharmaceutical association as defined herein further comprising (another) anti-cancer agent thus forming a pharmaceutical composition of the invention. In one example, said pharmaceutical composition further comprises at least one pharmaceutically acceptable excipient. In one example, said further anti-cancer agent is functionally associated with said GFR-binding compound and/or said bioactive carrier. Suitable further anti-cancer agents include but are not limited to, agents that inhibit the synthesis of DNA molecule building blocks, agents that directly damage DNA in the cell nucleus, agents that affect the synthesis or breakdown of mitotic spindles, and agents that inhibit kinase proteins by interacting with the kinase active site. Preferred examples of agents that inhibit the synthesis of DNA molecule building blocks include, but are not limited to, methotrexate (Abitrexate®), fluorouracil (Adrucil®), gemcitabine (Gemzar®), arabinosylcytosine (araC), hydroxyurea (Hydrea®), and mercaptopurine (Purinethol®). Preferred examples of agents that directly damage DNA in the cell nucleus include, but are not limited to, carboplatin (Paraplatin® and paraplatin-AQ®), cisplatin (Platinol®) and antibiotics such as daunorubicin (Cerubidine®), doxorubicin (Adriamycin®), and etoposide (VePesid®). Preferred examples of agents that affect the synthesis or breakdown of mitotic spindles include, but are not limited to, miotic disrupters such as Vinblastine (Velban®), Vincristine (Oncovin®) and Pacitaxel (Taxol®). Preferred examples of agents that inhibit kinase proteins include, but are not limited to, Afatinib®, Axitinib®, Bosulif®, Bosutinib®, Cabozantinib®, Caprelsa®, Cometriq®, Crizotinib®, Dasatinib®, Erlotinib®, Gilotrif®, Gleevec®, Ibrutinib®, Iclusig®, Imatinib®, Imbruvica®, Inlyta®, Lapatinib®, Nexavar®, Nilotinib®, Pazopanib®, Ponatinib®, Regorafenib®, Sorafenib®, Sprycel®, Stivarga®, Sunitinib®, Sutent®, Tarceva®, Tasigna®, Tivopath®, Tivozanib®, Tykerb®, Vandetanib®, Votrient®, Xalkori®, Zaltrap®, and Ziv-Aflibercept®.

[0648] In one example, the L-asparaginase enzyme may also be used as a further agent in combination with the pharmaceutical association or composition as defined herein. L-asparaginase enzyme has been reported e.g. in L-Asparaginase: A Promising Enzyme for Treatment of Acute Lymphoblastic Leukaemia, People's Journal of Scientific Research, Vol. 5(1), January 2012, which is incorporated herein by reference in its entirety, to act by depriving cancer cells (such as leukemia cells) of asparagine thus inducing their death.

[0649] Other anti-cancer agents may also be used such as nitrogen mustards, ethylamines, alkylsulfonates, triazenes, piperazines, nitrosureas and antibiotics such as anthracyclines, dactinomycin, bleomycin, adriamycin, or mithramycin.

[0650] In one aspect, the present disclosure provides a pharmaceutical association as defined herein further comprising an adhesion protein inhibitor thus forming a pharmaceutical composition of the invention. In one example, said pharmaceutical composition further comprises at least one pharmaceutically acceptable excipient. In one example, said adhesion protein inhibitor is functionally associated with said GFR-binding compound and/or said bioactive carrier. Suitable adhesion protein inhibitors include, but are not limited to, siRNA, mRNA or microRNAs which inhibits or down-regulates the gene or protein expression of at least one integrin, syndecan, selectin or dystroglycan, anti-integrin antibodies, anti-syndecan antibodies, anti-selectin antibodies, anti-dystroglycan antibodies, foldamers, or dendrimers.

[0651] In one example, said pharmaceutical association or combination comprises one (modified) GFR-binding compound. In one example, said pharmaceutical association or combination comprises two or more distinct (modified) GFR-binding compounds. In one example, said pharmaceutical association or combination comprises three or more distinct (modified) GFR-binding compounds. In one example, said pharmaceutical association or combination comprises four or more distinct (modified) GFR-binding compounds.

[0652] In one aspect, the present disclosure provides a process or method for manufacturing a neoplastic disease medicament, said process comprising associating or combining at least one bioactive carrier with at least one (modified) GFR-binding compound both as defined herein. Said step of associating or combining a bioactive carrier with a (modified) GFR-binding compound may be carried out using a method as already described above.

[0653] In one aspect, the present disclosure provides a process or method for manufacturing a neoplastic disease medicament precursor, said process comprising providing at least one (modified) GFR-binding compound and/or at least one bioactive carrier both as defined herein, wherein providing said bioactive carrier and/or said (modified) GFR-binding compound manufactures said neoplastic disease medicament.

[0654] In certain aspects, said pharmaceutical association or composition substantially down-regulates, reduces, inhibits or suppresses the gene and/or protein expression of at least one of cyclin-D1, cyclin-D2 or cyclin-D3. Because cyclins D1, D2 and D3 regulate the activity of Cyclin-dependent kinases (CDKs) 4 and 6 by forming cyclin-CDK protein complexes including Cyclin D1-CDK4 complex, Cyclin D1-CDK6 complex, Cyclin D2-CDK4 complex, Cyclin D2-CDK6 complex, Cyclin D3-CDK4 complex and Cyclin D3-CDK6 complex, said pharmaceutical association or composition was also observed to substantially reduce, inhibit, suppress or destabilise the formation of any one of such complexes.

[0655] There are many ways to test, measure and represent the inhibitory effect of a given substance on the gene or protein expression of cyclins D, but for the purpose of the present disclosure, and for the avoidance of any doubts, the inhibition values of a given pharmaceutical association or composition as defined herein is a measure of the gene expression of cyclins D as provided by RT-PCR. It is to be understood that the values of the gene expression of cyclins D disclosed herein correspond to the total gene expression of all cyclins D present in the tested cell i.e. D1, D2 and D3 as known at the date of the present disclosure.

[0656] As already stated above, pharmaceutical associations or compositions suitable for implementing embodiments of the present invention reduce the gene expression of cyclins D by at least 20% during at least one part of the G1 phase of the cell cycle as compared to the wild-type expression. The absolute and relative duration of each cell cycle phase (in other words, the cell cycle duration profile) usually varies (some phases such as the Gap phases may “shrink”) amongst healthy cells of different types (e.g. bone cells, skin cells, etc. . . . ) and between healthy cells and neoplastic cells of the same type (e.g. healthy bone cells and neoplastic bone cells). Typical average cell cycle duration is commonly accepted to be about 24 hours. Typically accepted phase durations for a healthy cell are 11 to 14 hours for the G1 phase, 5 to 12 hours for the S phase, 3 to 12 hours for the G2 phase and about 1 hour for the M phase. In neoplastic cells, such as in cancer cells, it is commonly admitted that, although the duration of the S and M phases may generally be conserved, the length of the G1 and G2 phases is generally shortened in order to increase cell division. Cell cycle phase's duration may thus vary significantly from one cell type to another. Consequently, conventionally and for the purpose of facilitating the comparative representation of the inhibition of the gene expression of cyclins D for different cell types, the gene expression is represented as a function of the cell cycle progression (starting from G1 and finishing with M) and not as a direct function of time.

[0657] Active or bioactive principles or ingredients: In the present description and unless otherwise indicated or contradictory in context, the term “(bio)active principle” or “(bio)active ingredient” generally refers to a molecule, compound or substance which is responsible for providing the desired biological effect. Without said active ingredient, the formulation or composition containing it, would not provide the desired biological effect. For example, in certain embodiments, formulation excipients are not considered as active ingredients in the pharmaceutical composition as defined herein.

[0658] In one example, said (modified) GFR-binding compound and bioactive carrier are both active principles/ingredients.

[0659] In one aspect, the present disclosure also provides a GFR-binding compound modified to be associated with a bioactive carrier (i.e. a modified GFR-binding compound) to form a pharmaceutical association all as defined herein, for use in the prevention or treatment of a neoplastic disease.

[0660] Neoplastic disease medicament: In the present description and unless otherwise indicated or contradictory in context, the term “neoplastic disease medicament” means a substance, compound, pharmaceutical association, combination, composition or formulation which is suitable for treating or preventing a neoplastic disease in a subject.

[0661] Subject carrying a neoplastic cell: In the present description and unless otherwise indicated or contradictory in context, the term “subject carrying a neoplastic cell” means that at least one cell constitutive of the subject is a neoplastic cell as defined herein.

[0662] In the present description and unless otherwise indicated or contradictory in context, the terms “functionally associated”, “functionally combined”, “functionalized”, “immobilized”, “deposited”, “coated”, or “grafted” all refer to the action of associating or functionalising at least one part of a bioactive carrier with a (modified) GFR-binding compound so that the desired biological, therapeutic and/or cosmetic effect e.g. inducing tissue formation, is obtained. The association or combination may be covalent and form, between said (modified) GFR-binding compound and said bioactive carrier, a covalent interaction as already defined herein, or, the association or combination may be non-covalent and form, between said (modified) GFR-binding compound and said bioactive carrier, a non-covalent interaction as already defined herein.

[0663] For example, in certain embodiments, a (modified) GFR-binding compound interacts covalently (makes at least one functional covalent interaction) with said bioactive carrier.

[0664] In one aspect, the present disclosure thus provides a pharmaceutical association or combination comprising a (modified) GFR-binding compound and a bioactive carrier for use in converting or recoding a neoplastic cell into a non-neoplastic cell, wherein said GFR-binding compound (before any modifications) and said bioactive carrier are both as defined herein.

[0665] In one particular example, said pharmaceutical association or combination comprises at least one GFR-binding compound selected from the group consisting of peptides of SEQ ID NO: 1 to 13564.

[0666] The present disclosure provides a pharmaceutical association or combination comprising a (modified) GFR-binding compound, wherein all of PEP1, PEP3, PEP5, PEP9, PEP11, PEP12, AA¹⁷, pairs and triplets thereof, disclaimers and provisos, are as already defined herein.

[0667] Suitable covalent association or functionalization techniques for implementing embodiments of the present invention include, but are not limited to, reductive amination coupling or photo-grafting such as described in H. Freichel et al., Macromol. Rapid Commun. 2011, 32, 616-621 and V. Pourcelle et al., Biomacromol. 2009, 10, 966-974, the content of which is hereby incorporated by reference in its entirety.

[0668] In one aspect, the present disclosure provides a production method or process useful for producing a pharmaceutical association or combination according to the present disclosure wherein said bioactive carrier is a biomaterial such as a ceramic or a titanium, comprising, or exclusively consisting of, the contacting of a compound of formula (C-I) and a bioactive carrier as defined herein under suitable covalent-bond formation conditions thereby forming at least one covalent bond between said compound (C-I) and said bioactive carrier thus forming a pharmaceutical association or combination according to the present disclosure:

[chemical structure]

wherein X is Si; wherein Y is a divalent organic linker; wherein A is a (modified) GFR-binding compound according to the present disclosure, wherein R¹ and R² are both independently an organic spacing-compound other than a leaving group as defined herein, and wherein R³ is a leaving group as defined herein;

[0669] In one particular example, a process or method which may be used to functionally associate or combine a (modified) GFR-binding compound with a bioactive carrier such as a ceramic or a titanium is shown in Scheme 1:

[chemical structure]

[0670] Such syntheses involve the formation of a covalent interaction (or association) between a (modified) GFR-binding compound (represented as (A)-SH in Scheme 1) and a bioactive carrier as defined herein.

[0671] In one particular example, a process or method which may be used to functionally associate or combine a (modified) GFR-binding compound with a bioactive carrier is a method for covalent functionalization or depositing of a (modified) GFR-binding compound onto a polyetheretherketone polymer (PEEK) surface wherein (i) the polymer is treated with ethylene diamine (NH₂═NH₂) to create NH₂ functions on a PEEK surface from ketone (═O) functions and (ii) the hereby modified PEEK-NH2 polymer is immersed in a solution of a chosen hetero-bifunctional cross-linker such as 3-succinimidyl-3-maleimidopropionate thereby reacting the maleimide group with a (modified) GFR-binding compound through e.g. a thiol group thereof.

[0672] In one particular example, a process or method which may be used to functionally associate or combine a (modified) GFR-binding compound with a bioactive carrier is a method for covalent functionalization or depositing of a (modified) GFR-binding compound onto a polylactic acid (PLLA) polymer wherein (i) the polymer is immersed in a solution containing, for instance, (dimethylaminopropyl)-3-ethylcarbodiimide hydrochloride+N-hydroxysuccinimide in (2-(N-morpholino)-ethanesulfonic acid and then (ii) rinsed using e.g. MilliQ water.

[0673] Leaving groups: As used herein, unless indicated otherwise or contradictory in context, the term “leaving group” means a molecular fragment which possesses the ability to depart with a pair of electrons in a heterolytic bond cleavage. Leaving groups are anions or neutral molecules and possess the ability to stabilize the additional electron density that results from bond heterolysis. Common anionic leaving groups are halogen atoms such as chlorine (C1), bromine (Br), and iodine (I), which leaves as a chloride ion (Cl⁻), a bromide ion (Br⁻) and an iodide ion (I⁻), respectively. Other leaving groups include sulfonate esters, such as tosylate (TsO⁻). Conventional neutral molecule leaving groups are water and ammonia. Suitable as leaving groups for implementing embodiments of the invention preferably include the group consisting of a halogen, a substituted or unsubstituted alkoxy group (—OR), a substituted or unsubstituted aryloxy or heteroaryloxy group (—OAr), a substituted or unsubstituted alkylcarbonyloxy group (—O₂CR), a substituted or unsubstituted arylcarbonyloxy or heteroarylcarbonyloxy group (—O₂CAr), a substituted or unsubstituted alkylsulfonyloxy group (—O₃SR), a substituted or unsubstituted arylsulfonyloxy or heteroarylsulfonyloxy group (—O₃SAr). Substituents of leaving groups include halogens, alkyl (preferably C1 to C5-alkyl) groups and alkoxy (preferably C1 to C5-alkoxy) groups.

### Y Group

[0674] In the present disclosure, the Y group is not aimed at being particularly limited and any moiety comprising at least one atom and having the ability to covalently or non-covalently, preferably covalently, link or interact with the X and A groups as defined herein thereby providing a stable connection between an active substance A and the X group as defined herein, is, unless contradictory or non-adapted in context, suitable for implementing embodiments of the present disclosure and is comprised within the scope of the invention.

[0675] Thus, in the present description and unless otherwise indicated, the term “linker”, when used in relation to a Y group, means any organic moiety comprising at least one atom and having the ability to interact covalently or non-covalently with an active substance A and covalently interact with an X group as defined herein.

[0676] In one example, Y groups include divalent organic radicals selected from the group consisting of a saturated or unsaturated, preferably saturated, hydrocarbon chain comprising between 1 and 30 carbon atoms, wherein said hydrocarbon chain is optionally interrupted by one or more non-carbon atom, preferably between 1 and 16, between 1 and 12 or between 1 and 8 non-carbon atoms as appropriate, wherein said non-carbon atom is selected, for instance, from the group consisting of —O—, —S—, —C(═O), —SO₂—, —N(Ri)(C═O)—, —N(Ri)-, and the following radical:

[chemical structure]

wherein Ri is selected from the group consisting of a hydrogen atom, a C1-C6 alkyl group and a aryl group, and wherein said hydrocarbon chain is non-substituted or substituted, by at least one radical selected from the group consisting of a halogen, a hydroxyl group, a C1-C20 alkyl group and a aryl group.

[0677] Suitable as Y groups for implementing embodiments of the invention include saturated or unsaturated hydrocarbon chains comprising between 1 and 20 carbon atoms, saturated or unsaturated hydrocarbon chains comprising between 1 and 10 carbon atoms, saturated or unsaturated hydrocarbon chains comprising between 1 and 5 carbon atoms, saturated or unsaturated hydrocarbon chains comprising 1, 2 or 3 carbon atoms, all of which being specifically and individually preferred.

[0678] Also suitable as Y groups for implementing embodiments of the invention include saturated or unsaturated hydrocarbon chains comprising between 1 and 20 carbon atoms, saturated or unsaturated hydrocarbon chains comprising between 1 and 10 carbon atoms, saturated or unsaturated hydrocarbon chains comprising between 1 and 5 carbon atoms, saturated or unsaturated hydrocarbon chains comprising 1, 2 or 3 carbon atoms, and in which said hydrocarbon chain is optionally interrupted by one or more, preferably between 1 and 16, between 1 and 12 or between 1 and 8, non-carbon atom, selected from the group consisting of an oxygen atom, a nitrogen atom, a carbonyl group and/or the following radical:

[chemical structure]

all of which being specifically preferred and individually contemplated.

[0679] Also suitable as Y groups for implementing embodiments of the invention is:

[chemical structure]

wherein n is comprised between 1 and 29, in particular between 1 and 5; and wherein m is comprised between 1 and 29, in particular between 1 and 5.

[0680] Suitable covalent-bond formation conditions: As used herein, unless indicated otherwise or contradictory in context, the term “suitable covalent-bond formation conditions” means reaction conditions such as pressure, temperature, reagent quantities, solvent's type and quantity, or stirring, under which starting materials may contact and provide at least one further material resulting from the formation of at least one covalent bond between said starting materials. Suitable as covalent-bond formation conditions for implementing embodiments of the present invention preferably include substantially atmospheric conditions.

[0681] Organic spacing-compound: In the present description and unless otherwise indicated, the term “organic spacing compound” means an organic chemical radical (preferably monofunctional radical) having the ability to create a steric effect/hindrance and/or electronic effect/hindrance in a direct vicinity of a (modified) GFR-binding compound of the present disclosure. Suitable organic spacing compounds include, but are not limited to, monovalent organic radicals independently selected from the group consisting of a saturated or unsaturated hydrocarbon chain of at most 20 nanometres (nm) in length, preferably at most 10 nm, 5 nm, 1 nm, 0.5 nm, 0.1 nm, 0.05 nm or 0.01 nm, wherein said hydrocarbon chain is optionally interrupted by one or more, preferably between 1 and 16, between 1 and 12 or between 1 and 8 non-carbon atoms as appropriate, wherein said non-carbon atom is selected from the group consisting of —O—, —S—, —C(═O), —SO₂—, —N(Ri)(C═O)—, and —N(Ri)-, wherein Ri is selected from the group consisting of a hydrogen atom, a C1-C6 alkyl group and an aryl group, and wherein said hydrocarbon chain is non-substituted or substituted by at least one radical selected from the group consisting of a halogen, a hydroxyl group, a C1-C20 alkyl group and an aryl group. In particular, organic spacing compounds include saturated or unsaturated hydrocarbon chains comprising between 1 and 80 carbon atoms, saturated or unsaturated hydrocarbon chains comprising between 1 and 60 carbon atoms, saturated or unsaturated hydrocarbon chains comprising between 1 and 40 carbon atoms, saturated or unsaturated hydrocarbon chains comprising between 1 and 20 carbon atoms, saturated or unsaturated hydrocarbon chains comprising between 1 and 10 carbon atoms, saturated hydrocarbon chains comprising 1, 2, 3, 4, 5 or 6 carbon atoms, all of which being specifically and individually preferred. In one example, the saturated hydrocarbon chain may be methyl, ethyl, propyl, butyl or pentyl. In one example, said unsaturated hydrocarbon chain may be ethylene, propene, 1- or 2-butene, 1-, 2- or 3-pentene, acetylene, propyne, 1- or 2-butyne, 1-, 2- or 3-pentyne.

[0682] Saturated hydrocarbon chain: In the present description and unless otherwise indicated, the terms “saturated hydrocarbon chain” means a chain of carbon atoms linked together by single bonds and has hydrogen atoms filling all of the other bonding orbitals of the carbon atoms.

[0683] Unsaturated hydrocarbon chain: In the present description and unless otherwise indicated, the terms “unsaturated hydrocarbon chain” means a chain of carbon that contains carbon-carbon double bonds or triple bonds, such as those found in alkenes or alkynes, respectively.

[0684] Atmospheric conditions: As used herein, unless indicated otherwise or contradictory in context, the term “atmospheric conditions” or “ambient conditions”, which are interchangeably used, refers to conditions which may be found naturally at an experimentation location. For example, in certain embodiments, typical atmospheric conditions in a chemistry/biology laboratory are a temperature of between about 15° C. and about 35° C. and a pressure of about 1 atm.

[0685] Solution: As used herein, unless indicated otherwise or contradictory in context, the term “solution” means a homogeneous mixture composed of only one phase, which is stable, which does not allow beam of light to scatter, in which the particles of solute cannot be seen by naked eye and from which a solute cannot be separated by filtration.

[0686] Suspension: As used herein, unless indicated otherwise or contradictory in context, the term “suspension” means a heterogeneous mixture containing solid particles that are sufficiently large for sedimentation. Typically, said solid particles are larger than one micrometer. In general, the internal phase (solid) is dispersed throughout the external phase (fluid) through mechanical agitation, with the use of certain excipients or suspending agents.

[0687] Suitable non-covalent association or functionalization techniques for implementing embodiments of the present invention include, but are not limited to, association(s) between a bioactive carrier-affinity containing group as already defined herein and at least part of a bioactive carrier. Such association(s) involves the formation of at least one non-covalent interaction (or attachment) between a (modified) GFR-binding compound and a bioactive carrier as defined herein.

[0688] In one example, said pharmaceutical association or combination is functionally associated with at least two, at least three, at least four, at least five, at least six, at least seven, at least eight, at least nine or at least ten (modified) GFR-binding compounds, each possessing a different and distinct chemical structure.

[0689] In one example, said pharmaceutical association or combination does not comprise a layer of polysiloxane.

[0690] In an example, a bioactive carrier of the present invention (further) comprises at least one compound selected from the group consisting of anti-cancer agents as already defined herein, and an anti-inflammatory agent such as Celecoxib, Diclofenac, Diflunisal, Etodolac, Ibuprofen, Indomethacin, Ketoprofen, Ketorolac, Nabumetone, Naproxen, Oxaprozin, Piroxicam, Salsalate, Sulindac or Tolmetin.

[0691] For example, in certain embodiments, said further compounds interact covalently or non-covalently as already defined herein with said bioactive carrier.

[0692] For example, in certain embodiments, a pharmaceutical association or combination as defined herein comprises at least one (modified) GFR-binding compound, and at least one bioactive carrier, wherein said bioactive carrier:
[0693] has a porosity (or average pore diameter) comprised between 1 nm and 1000 μm, as measured by scanning electronic microscopy for pore sizes within the supra-nanometre range and by atomic force microscopy for pore sizes within the nanometre range, and/or
[0694] comprises a stiffness of at least 5 kPa, preferably at least 35 kPa, as measured by Dynamic Mechanical Analysis, and/or
[0695] is selected from the group consisting of biopolymers (collagen, fibrin, . . . etc), synthetic polymers (PEEK, PET, . . . etc), solid materials (Titanium, Metals . . . etc) and ceramics (Hydroxyapatite, Beta-tricalcium Phosphate, Biphasic Calcium Phosphate . . . etc), and/or
[0696] comprises a density or concentration of associated compound (1) comprised between 0.05×10⁻¹² mol/mm² and 50×10⁻¹² mol/mm², as measured by conventional fluorescence microscopy or calculated theoretically on the basis of the peptide size, and/or
[0697] does not comprise a layer of polysiloxane.

[0698] Porosity: As used herein, unless indicated otherwise or contradictory in context, the term “porosity” refers to the measure of the void spaces in a substance or material, and is a fraction of the volume of voids over the total volume, between 0 and 1, or as a percentage between 0 and 100%. There are many ways to test and measure the porosity of a substance or material, but for the purpose of the present disclosure, and for the avoidance of any doubts, porosity values are provided in manometers (nm) as obtained using atomic force microscopy for small pore diameters (up to 100 nm) and scanning electron microscopy for larger pore sizes.

[0699] Stiffness: As used herein, unless indicated otherwise or contradictory in context, the term “stiffness” refers to the rigidity of a substance or material i.e. the extent to which it resists deformation in response to an applied force. There are many ways to test and measure the stiffness of a substance or material, but for the purpose of the present disclosure, and for the avoidance of any doubts, stiffness values are provided in Pascal (Pa) as obtained using Dynamic Mechanical Analysis (DMA). Particularly preferred stiffness values are comprised between 1 kPa and 100 kPa and not more than 5 GPa depending on the tissue to be regenerated or repaired.

[0700] As already stated, the nature of the biomaterial is an important parameter. Particularly good results have been obtained using bioactive carriers composed mostly with the main material component of the tissue to be regenerated and/or repaired. This generally allows for a better integration of the bioactive carrier, a better resorption from the surrounding cells already present and therefore a better regeneration or repair of the targeted tissue to be achieved.

[0701] In one particular example, the concentration or density (as defined herein) of (modified) GFR-binding compounds in a pharmaceutical association, combination or composition as defined herein is comprised between 0.05 and 50 pmol/mm², in particular comprised between 0.1 and 30 pmol/mm², comprised between 0.1 and 10 pmol/mm², comprised between 0.1 and 5 pmol/mm², or comprised between 0.1 and 2 pmol/mm², each range being preferred and specifically contemplated to be combined with any other numerical or non-numerical ranges as described herein. Most particularly, the density is comprised between 0.2 and 2 pmol/mm².

### VIII. Pharmaceutical Compositions

[0702] In one aspect, the present disclosure provides a composition such as a pharmaceutical, prophylactic, surgical, diagnostic, or imaging composition (hereinafter shorten as pharmaceutical or medical composition) for the uses and methods already disclosed herein comprising at least one pharmaceutical association or combination as defined herein and further comprising at least one pharmaceutically acceptable excipient carriers and/or vehicles.

[0703] Formulations of the pharmaceutical compositions described herein may be prepared by any method known or hereafter developed in the art of pharmacology. Generally, such methods of preparation include the step of bringing the active ingredient(s) into association with an excipient and/or one or more other accessory ingredients, and then, if necessary and/or desirable, shaping and/or packaging the product into a desired single- or multi-dose unit.

[0704] For example, in certain embodiments, a pharmaceutical composition as defined herein may contain between 0.01% and 100% by weight (over the total weight of the pharmaceutical composition) of a (modified) GFR-binding compound or a pharmaceutical association or combination, both as defined herein, as a pharmaceutically effective amount. The pharmaceutical composition particularly comprises between 0.01% and 95%, between 0.01% and 90%, between 0.01% and 85%, between 0.01% and 80%, between 0.01% and 75%, between 0.01% and 70%, between 0.01% and 65%, between 0.01% and 60%, between 0.01% and 55%, between 0.01% and 50%, between 0.01% and 45%, between 0.01% and 40%, between 0.01% and 35%, between 0.01% and 30%, between 0.01% and 25%, between 0.01% and 20%, between 0.01% and 15%, between 0.01% and 10%, between 0.01% and 5%, between 0.1% and 100%, between 0.1% and 95%, between 0.1% and 90%, between 0.1% and 85%, between 0.1% and 80%, between 0.1% and 75%, between 0.1% and 70%, between 0.1% and 65%, between 0.1% and 60%, between 0.1% and 55%, between 0.1% and 50%, between 0.1% and 45%, between 0.1% and 40%, between 0.1% and 35%, between 0.1% and 30%, between 0.1% and 25%, between 0.1% and 20%, between 0.1% and 15%, between 0.1% and 10%, and between 0.1% and 5% by weight (over the total weight of the pharmaceutical composition) of any one of a (modified) GFR-binding compound or a pharmaceutical association or combination as defined herein.

[0705] Generally, the (modified) GFR-binding compounds or pharmaceutical association or combinations as defined herein may thus be administered as such or as part of a formulation in association with one or more pharmaceutically acceptable excipients, carriers and/or vehicles so as to form what is generally referred to as a pharmaceutical composition or pharmaceutical formulation.

[0706] Pharmaceutical effective amount: As used herein, unless indicated otherwise or contradictory in context, the term “pharmaceutical effective amount” or “therapeutically effective amount” refers to an amount of an agent to be delivered (e.g., nucleic acid, protein, peptide, drug, therapeutic agent, diagnostic agent, prophylactic agent, etc.) that is sufficient, when administered to a subject suffering from or susceptible to an infection, disease, disorder, condition and/or pathology, to produce/provide a therapeutically effective outcome. Thus, a “pharmaceutical effective amount” depends upon the context in which it is being applied. A pharmaceutical effective amount of a composition is provided based, at least in part, on the target tissue, target cell type, means of administration, physical characteristics of the pharmaceutical association or composition (e.g., size, 3D shape, etc.), and other determinants. For example, in certain embodiments, in the context of administering an agent that treats cancer, a pharmaceutical effective amount of an agent is, for example, in certain embodiments, an amount sufficient to achieve treatment, as defined herein, of cancer, as compared to the response obtained without administration of the agent. For example, in certain embodiments, a therapeutically effective amount as used herein is any of the herein disclosed weight or molar amounts, ratios or ranges of the (modified) GFR-binding compound, the bioactive carrier or the association/combination thereof.

[0707] Therapeutically effective outcome: As used herein, unless indicated otherwise or contradictory in context, the term “therapeutically effective outcome” refers to an outcome that is sufficient in a subject suffering from or susceptible to an infection, disease, disorder, condition and/or pathology, to treat, improve symptoms of, diagnose, prevent, and/or delay the onset of the infection, disease, disorder, condition and/or pathology.

[0708] Therapeutic Agent: As used herein, unless indicated otherwise or contradictory in context, the term “therapeutic agent” refers to any agent that, when administered to a subject/patient/individual, has a therapeutic, diagnostic, and/or prophylactic effect and/or elicits a desired biological and/or pharmacological effect.

[0709] Pharmaceutically acceptable: As used herein, unless indicated otherwise or contradictory in context, the term “pharmaceutically acceptable” refers to those compounds, materials, compositions, and/or dosage forms which are, within the ambit of sound medical judgment, suitable for use in contact with the tissues of human beings and animals without excessive toxicity, irritation, allergic response, or other problem or complication, commensurate with a reasonable benefit/risk ratio.

[0710] Pharmaceutically acceptable excipients: As used herein, unless indicated otherwise or contradictory in context, the term “pharmaceutically acceptable excipient” refers to any ingredient other than the compounds described herein (i.e. GFR-binding compounds, bioactive carriers as defined herein or any further active principles) and satisfying to the herein defined definition of pharmaceutically acceptable for a patient. Excipients may include, for example: inert diluents, dispersing and/or granulating agents, surface active agents and/or emulsifiers, disintegrating agents, binding agents, preservatives, buffering agents, lubricating agents, oils, printing inks, sweeteners, and/or waters of hydration. The choice of excipient(s) will largely depend on factors such as the particular mode of administration, the effect of the excipient(s) on solubility and stability, and the nature of the dosage form. In one embodiment, the pharmaceutically acceptable excipient is not a naturally occurring excipient.

[0711] Diluents: As used herein, unless indicated otherwise or contradictory in context, diluents include, but are not limited to, calcium carbonate, sodium carbonate, calcium phosphate, dicalcium phosphate, calcium sulfate, calcium hydrogen phosphate, sodium phosphate lactose, sucrose, cellulose, microcrystalline cellulose, kaolin, mannitol, sorbitol, inositol, sodium chloride, dry starch, powdered sugar and/or any combinations thereof.

[0712] Buffering agents: As used herein, unless indicated otherwise or contradictory in context, buffering agents include, but are not limited to, citrate buffer solutions, acetate buffer solutions, phosphate buffer solutions, ammonium chloride, potassium acetate, potassium chloride, monobasic potassium phosphate, calcium carbonate, calcium chloride, calcium citrate, calcium gluconate, calcium lactate, propanoic acid, calcium levulinate, pentanoic acid, phosphoric acid, calcium hydroxide phosphate, sodium acetate, sodium bicarbonate, sodium chloride, sodium citrate, sodium lactate, magnesium hydroxide, aluminum hydroxide, alginic acid, pyrogen-free water, isotonic saline, Ringer's solution, ethyl alcohol and any combinations thereof.

[0713] Granulating and/or dispersing agents: As used herein, unless indicated otherwise or contradictory in context, granulating and/or dispersing agents include, but are not limited to, potato starch, corn starch, tapioca starch, sodium starch glycolate, clays, alginic acid, guar gum, citrus pulp, agar, bentonite, cellulose and wood products, natural sponge, cation-exchange resins, calcium carbonate, silicates, sodium carbonate, cross-linked poly(vinyl-pyrrolidone), sodium carboxymethyl starch, carboxymethyl cellulose, cross-linked sodium carboxymethyl cellulose, methylcellulose, pregelatinized starch, microcrystalline starch, water insoluble starch, calcium carboxymethyl cellulose, magnesium aluminum silicate, sodium lauryl sulfate, quaternary ammonium compounds and/or any combinations thereof.

[0714] Surface active agents and/or emulsifiers: As used herein, unless indicated otherwise or contradictory in context, surface active agents and/or emulsifiers include, but are not limited to, colloidal clays (such as aluminum silicates and magnesium aluminum silicates), natural emulsifiers (such as acacia, agar, sodium alginate, cholesterol, xanthan, pectin, gelatin, egg yolk, casein, cholesterol, wax, and lecithin), long chain amino acid derivatives, high molecular weight alcohols (such as stearyl, cetyl and oleyl alcohols, triacetin monostearate, ethylene glycol distearate and glyceryl monostearate), carbomers (such as carboxy polymethylene, polyacrylic acid, acrylic acid polymer, and carboxyvinyl polymer), diethylene glycol monolaurate, triethanolamine oleate, sodium oleate, potassium oleate, ethyl oleate, oleic acid, ethyl laurate, sodium lauryl sulfate, cetrimonium bromide, cetylpyridinium chloride, benzalkonium chloride, docusate sodium, carrageenan, cellulosic derivatives (such as carboxymethylcellulose sodium, hydroxymethyl cellulose, hydroxypropyl methylcellulose and methylcellulose), sorbitan fatty acid esters (such as polyoxyethylene sorbitan monolaurate, polyoxyethylene sorbitan, polyoxyethylene sorbitan monooleate, sorbitan monopalmitate and glyceryl monooleate), polyoxyethylene esters, sucrose fatty acid esters, polyethylene glycol fatty acid esters, polyoxyethylene ethers, poly(vinyl-pyrrolidone), and any combinations thereof.

[0715] Binding agents: As used herein, unless indicated otherwise or contradictory in context, binding agents include, but are not limited to, natural and synthetic gums (such as acacia, sodium alginate, carboxymethylcellulose, methylcellulose, ethylcellulose, hydroxyethylcellulose, hydroxypropyl cellulose, hydroxypropyl methylcellulose, microcrystalline cellulose, cellulose acetate and poly(vinyl-pyrrolidone), gelatin, starch, sugars (such as sucrose, dextrose, glucose, dextrin, lactose, and mannitol), alignates, magnesium aluminum silicates, polyethylene glycol, polyethylene oxide, inorganic calcium salts, water, alcohol, silicic acid, waxes, and any combinations thereof.

[0716] Preservatives: As used herein, unless indicated otherwise or contradictory in context, preservatives include, but are not limited to, antioxidants, chelating agents, antifungal preservatives, antimicrobial preservatives, acidic preservatives, and alcohol preservatives.

[0717] Antioxidants: As used herein, unless indicated otherwise or contradictory in context, antioxidants include, but are not limited to, alpha tocopherol, ascorbic acid, acorbyl palmitate, butylated hydroxyanisole, propionic acid, potassium metabisulfite, propyl gallate, sodium metabisulfite, sodium ascorbate, and sodium sulfite.

[0718] Chelating agents: As used herein, unless indicated otherwise or contradictory in context, chelating agents include ethylenediaminetetraacetic acid (EDTA), fumaric acid, malic acid, phosphoric acid, citric acid monohydrate and tartaric acid.

[0719] Antimicrobial preservatives: As used herein, unless indicated otherwise or contradictory in context, antimicrobial preservatives include, but are not limited to, benzalkonium chloride, benzethonium chloride, chlorhexidine, chlorobutanol, chlorocresol, chloroxylenol, benzyl alcohol, bronopol, cetylpyridinium chloride, cresol, ethyl alcohol, glycerin, hexetidine, imidurea, phenoxyethanol, phenylmercuric nitrate, phenylethyl alcohol, phenol, and propylene glycol.

[0720] Antifungal preservatives: As used herein, unless indicated otherwise or contradictory in context, antifungal preservatives include, but are not limited to, benzoic acid, hydroxybenzoic acid, butyl paraben, methyl paraben, ethyl paraben, propyl paraben, potassium benzoate, sodium propionate, potassium sorbate, and/or sorbic acid.

[0721] Alcohol preservatives: As used herein, unless indicated otherwise or contradictory in context, alcohol preservatives include, but are not limited to, phenol, phenolic compounds, bisphenol, ethanol, polyethylene glycol, chlorobutanol and hydroxybenzoate.

[0722] Acidic preservatives: As used herein, unless indicated otherwise or contradictory in context, acidic preservatives include, but are not limited to, vitamin A, vitamin C, vitamin E, beta-carotene, acetic acid, citric acid, dehydroacetic acid, and sorbic acid.

[0723] Lubricating agents: As used herein, unless indicated otherwise or contradictory in context, lubricating agents include, but are not limited to, magnesium stearate, calcium stearate, stearic acid, sodium benzoate, sodium acetate, sodium chloride, silica, talc, malt, glyceryl behanate, hydrogenated vegetable oils, polyethylene glycol, magnesium lauryl sulphate and any combinations thereof.

[0724] Sweeteners: As used herein, unless indicated otherwise or contradictory in context, sweeteners include, but are not limited to, any natural or synthetic sugar substitutes. Natural sugar substitutes include, but are not limited to, brazzein, curculin, erythritol, glycyrrhizin, glycerol, hydrogenated starch hydrolysates, inulin, isomalt, lactitol, mogroside mix, mabinlin, maltitol, malto-oligosaccharide, mannitol, miraculin, monatin, monellin, osladin, pentadin, sorbitol, stevia, tagatose, thaumatin, and xylitol. Synthetic sugar substitutes include, but are not limited to, acesulfame potassium, advantame, alitame, aspartame, salt of aspartame-acesulfame, sodium cyclamate, dulcin, glucin, neohesperidin dihydrochalcone, neotame, P-4000, saccharin, Sucralose.

[0725] Exemplary excipients include, but are not limited to: butylated hydroxytoluene (BHT), calcium carbonate, calcium phosphate (dibasic), calcium stearate, croscarmellose, crosslinked polyvinyl pyrrolidone, citric acid, crospovidone, cysteine, ethylcellulose, gelatin, hydroxypropyl cellulose, hydroxypropyl methylcellulose, lactose, magnesium stearate, maltitol, mannitol, methionine, methylcellulose, methyl paraben, microcrystalline cellulose, polyethylene glycol, polyvinyl pyrrolidone, povidone, pregelatinized starch, propyl paraben, retinyl palmitate, shellac, silicon dioxide, sodium carboxymethyl cellulose, sodium citrate, sodium starch glycolate, sorbitol, starch, stearic acid, sucrose, talc, titanium dioxide, vitamin A, vitamin E, vitamin C, and xylitol. Suitable excipients for use in the present invention also include, but are not limited to, water, phosphate buffered saline (PBS), Ringer's solution, dextrose solution, serum-containing solutions, Hank's solution, other aqueous physiologically balanced solutions, oils, esters and glycols. Aqueous excipients can contain suitable auxiliary substances required to approximate the physiological conditions of the recipient, for example, in certain embodiments, by enhancing chemical stability and isotonicity.

[0726] Pharmaceutically/medically acceptable carriers: As used herein, unless indicated otherwise or contradictory in context, the term “pharmaceutically acceptable carriers”, “medically acceptable carrier” or “carriers” refers to pharmaceutically acceptable excipients and/or delivery vehicles suitable for delivering a pharmaceutical or therapeutic composition useful in a therapeutic method and uses of the present invention to a suitable in-vivo or ex-vivo site. Preferred pharmaceutically acceptable carriers are capable of maintaining a composition containing an active combination or association of a (modified) GFR-binding compound and a bioactive carrier as defined herein, in a form that, upon arrival of the combination to a target cell, site or tissue, the active combination is capable of performing one or more biological functions thereof the protein at the cell or tissue site. One type of pharmaceutically acceptable carrier includes a controlled release formulation that is capable of slowly releasing a composition or combination into an animal. In one example, a controlled release formulation comprises an active combination or association as defined herein in a controlled release vehicle. Suitable controlled release vehicles include, but are not limited to, microparticles, biocompatible polymers, other polymeric matrices, capsules, microcapsules, osmotic pumps, bolus preparations, diffusion devices, liposomes, lipospheres, and transdermal delivery systems. Such suitable controlled release vehicle may be combined with at least one targeting moiety. In one embodiment, the pharmaceutically acceptable carrier is not a naturally occurring carrier.

[0727] Targeting Moieties: In one example, the pharmaceutical association or combination disclosed herein includes at least one binding partner which functions to target the cell to a specific tissue space or to interact with a specific moiety, either in-vivo, ex-vivo or in-vitro. Suitable binding partners include antibodies and functional fragments thereof, scaffold proteins, or peptides.

[0728] In one example, said excipients, carriers or vehicles are compatible with the (modified) GFR-binding compounds or pharmaceutical association or combinations defined herein so that they do not disrupt, tamper, modify, de-organise, de-combine or de-associate said the (modified) GFR-binding compounds or pharmaceutical association or combinations. In contrast, said excipients, carriers or vehicles preserves, maintains or reinforces the stability of the (modified) GFR-binding compounds or pharmaceutical association or combinations so as to preserve their biological activity.

[0729] In one example, the present pharmaceutical compositions also include pharmaceutically acceptable salts and/or solvates and/or prodrugs and/or isotopically-labelled derivatives of the substances and compounds described herein such as the (modified) GFR-binding compounds or any other active principles.

[0730] Pharmaceutically acceptable salts: As used herein, unless indicated otherwise or contradictory in context, the term “pharmaceutically acceptable salts” refers to derivatives of the disclosed substances and compounds wherein the parent substance or compound is modified by converting an existing acid or base moiety to its salt form (e.g., by reacting the free base group with a suitable organic acid). The degree of ionization in the salt may vary from completely ionized to almost non-ionized. Examples of pharmaceutically acceptable salts include, but are not limited to, mineral or organic acid salts of basic residues such as amines; alkali or organic salts of acidic residues such as carboxylic acids; and the like. Representative acid addition salts include acetate, adipate, alginate, ascorbate, aspartate, benzenesulfonate, benzoate, bisulfate, borate, butyrate, camphorate, camphorsulfonate, citrate, cyclopentanepropionate, digluconate, dodecylsulfate, ethanesulfonate, fumarate, glucoheptonate, glycerophosphate, hemisulfate, heptonate, hexanoate, hydrobromide, hydrochloride, hydroiodide, 2-hydroxy-ethanesulfonate, lactobionate, lactate, laurate, lauryl sulfate, malate, maleate, malonate, methanesulfonate, 2-naphthalenesulfonate, nicotinate, nitrate, oleate, oxalate, palmitate, pamoate, pectinate, persulfate, 3-phenylpropionate, phosphate, picrate, pivalate, propionate, stearate, succinate, sulfate, tartrate, thiocyanate, toluenesulfonate, undecanoate, valerate salts, and the like. Representative alkali or alkaline earth metal salts include sodium, lithium, potassium, calcium, magnesium, and the like, as well as nontoxic ammonium, quaternary ammonium, and amine cations, including, but not limited to ammonium, tetramethylammonium, tetraethylammonium, methylamine, dimethylamine, trimethylamine, triethylamine, ethylamine, and the like. The pharmaceutically acceptable salts of the present disclosure include the conventional non-toxic salts of the parent compound formed, for example, in certain embodiments, from non-toxic inorganic or organic acids. The pharmaceutically acceptable salts of the present disclosure can be synthesized from the parent compound which contains a basic or acidic moiety by conventional chemical methods. Generally, such salts can be prepared by reacting the free acid or base forms of these compounds with a stoichiometric amount of the appropriate base or acid in water or in an organic solvent, or in a mixture of the two; generally, non-aqueous media like ether, ethyl acetate, ethanol, isopropanol, or acetonitrile are preferred. Lists of suitable salts are generally found in Remington's Pharmaceutical Sciences, 17th ed., Mack Publishing Company, Easton, Pa., 1985, p. 1418 and in Pharmaceutical Salts: Properties, Selection, and Use, P. H. Stahl and C. G. Wermuth (eds.), Wiley-VCH, 2008, each of which being incorporated herein by reference in its entirety. In one embodiment, the pharmaceutically acceptable salt is not a naturally occurring salt.

[0731] Pharmaceutically acceptable solvate: As used herein, unless indicated otherwise or contradictory in context, the term “pharmaceutically acceptable solvate,” refers to a compound, substance, association or combination wherein molecules of a suitable solvent are incorporated in the crystal lattice. A suitable solvent is physiologically tolerable at the dosage administered. For example, in certain embodiments, solvates may be prepared by crystallization, recrystallization, or precipitation from a solution that includes organic solvents, water, or a mixture thereof. Examples of suitable solvents are ethanol, water (For example, in certain embodiments, mono-, di-, and tri-hydrates), N-methylpyrrolidinone (NMP), dimethyl sulfoxide (DMSO), dimethylformamide (DMF), [Nu],[Nu]′-dimethylacetamide (DMAC), 1,3-dimethyl-2-imidazolidinone (DMEU), 1,3-dimethyl-3,4,5,6-tetrahydro-2-(1H)-pyrimidinone (DMPU), acetonitrile (ACN), propylene glycol, ethyl acetate, benzyl alcohol, 2-pyrrolidone, benzyl benzoate, and the like. When water is the solvent, the solvate is referred to as a “hydrate”. In one embodiment, the pharmaceutically acceptable solvate is not a naturally occurring solvate.

[0732] Pharmaceutically acceptable isotopically-labelled compounds: In one example, the present invention also includes all pharmaceutically acceptable isotopically-labelled derivatives, which are identical to the compounds, substances, combinations or associations described herein but wherein one or more atoms are replaced by atoms having an atomic mass or mass number different from the atomic mass or mass number usually found in nature. Examples of isotopes that may be incorporated into GFR-binding compound(s) as defined herein include isotopes of hydrogen, carbon, chlorine, fluorine, iodine, nitrogen, oxygen, and sulfur, such as ²H, ³H, ¹¹C, ¹³C, ¹⁴C, ³⁶Cl, ¹⁸F, ¹²³I, ¹³N, ¹⁵N, ¹⁷O, ¹⁸O, and ³⁵S, respectively. It should be understood that compounds, substances, combinations, associations, prodrugs, and pharmaceutical acceptable salts thereof described herein which contain the aforementioned isotopes and/or other isotopes of other atoms are within the scope of the invention. Certain isotopically labeled of the compounds, substances, combinations, associations, prodrugs, and salts thereof such as, for example, in certain embodiments, those incorporating a radioactive isotope such as ³H and ¹⁴C, are useful in drug and/or substrate tissue distribution studies. Tritium, i.e. ³H, and carbon-14, i.e. ¹⁴C, are particularly preferred due to their ease of preparation and detection. Further, substitution with heavier isotopes such as deuterium, i.e. ²H, can afford certain therapeutic advantages resulting from greater metabolic stability, for example, in certain embodiments, increased in vivo half-life or reduced dosage requirements, and hence may be preferred in some circumstances. Isotopically labeled compounds, substances, combinations, associations, prodrugs, and salts thereof can generally be prepared by carrying out the procedures disclosed in the Schemes and/or in the Examples by substituting a readily available non-isotopically labeled reagent for an isotopically labeled reagent.

[0733] Prodrugs: As used herein, unless indicated otherwise or contradictory in context, the term “prodrug” refers to a compound, substance, combination or association that is transformed in vivo to yield a compound, substance, combination or association as defined herein or a pharmaceutically acceptable salt or solvate thereof. The transformation may occur by various mechanisms, such as via hydrolysis in blood. A prodrug of a compound, substance, combination or association defined herein may be formed in a conventional manner with one or more functional groups in the compound, such as an amino, hydroxyl or carboxyl group.

[0734] For example, in certain embodiments, if a compound defined herein contains a carboxylic acid functional group, a prodrug can comprise: (1) an ester formed by the replacement of a hydrogen of the acid group with a group such as (C1-C6)alkyl or (C6-C10) aryl; (2) an activated ester formed by the replacement of the hydrogen of the acid group with groups such as —(CR²)COOR′, where CR² is a spacer and R can be groups such as H or methyl and R′ can be groups such as (C1-C6)alkyl or (C6-C10) aryl; and/or (3) a carbonate formed by the replacement of the hydrogen of the acid with groups such as CHROCOOR′ where R can be groups such as H or methyl and R′ can be groups such as (C1-C6)alkyl or (C6-C10)aryl. Similarly, if a compound defined herein contains an alcohol functional group, a prodrug can be formed via the replacement of the hydrogen of the alcohol with groups such as (C1-C6)alkanoyloxymethyl or (C1-C6)alkanoyloxyaryl or by forming an ester via condensation with, for example, in certain embodiments, an amino acid. Where a compound defined herein contains a primary or secondary amino group, a prodrug may comprise, for example, in certain embodiments, an amide formed by the replacement of one or both of the hydrogen atoms of the amino group with (C1-C10)alkanoyl or (C6-C10)aroyl. Other prodrugs of amines are well known to those skilled in the art. Alternatively, certain compounds defined herein may themselves act as prodrugs of other compounds defined herein. Discussions regarding prodrugs and their use can be found in, for example, in certain embodiments, “Prodrugs as Novel Delivery Systems,” T. Higuchi and W. Stella, Vol. 14 of the ACS Symposium Series, and Bioreversible Carriers in Drug Design, Pergamon Press, 1987 (ed. E B Roche, American Pharmaceutical Association). Examples of other prodrug types may be found in the aforementioned reference which is hereby incorporated by reference.

### IX. Administration Routes and Procedures

[0735] Compounds, substances, pharmaceutical associations or combinations to be delivered and/or pharmaceutical, dermatological, prophylactic, diagnostic, or imaging compositions or formulations thereof in accordance with the present disclosure may be administered by any route of administration effective for preventing, treating, diagnosing, or imaging a disease, disorder, and/or condition and/or treating or alleviating at least one symptoms thereof.

[0736] Suitable administration protocols include any in-vitro, in-vivo or ex-vivo administration protocol. The preferred types and routes of administration will be apparent to those of skill in the art, depending on the type of condition or disease to be prevented or treated; whether the composition is nucleic acid based, protein based, cell based or combinations or mixtures thereof; and/or the target cell/tissue.

[0737] Cells, tissues or organs can be contacted ex vivo or in vitro with a pharmaceutical association or combination for uses and methods of the invention by any suitable method, including mixing or the use of a delivery vehicle. Effective in vitro or ex vivo culture conditions include, but are not limited to, effective media, bioreactor, temperature, pH and oxygen conditions that permit cell culture. An effective medium refers to any medium in which a given host cell or tissue is typically cultured. Such medium typically comprises an aqueous medium having assimilable carbon, nitrogen and phosphate sources, and appropriate salts, minerals, metals and other nutrients, such as vitamins. Cells can be cultured in conventional fermentation bioreactors, shake flasks, test tubes, microtiter dishes, and petri plates. Culturing can be carried out at a temperature, pH and oxygen content appropriate for a cell or tissue. Such culturing conditions are within the expertise of one of ordinary skill in the art.

[0738] In one aspect, the present disclosure thus also provides a method for converting a neoplastic cell into a non-neoplastic cell, in-vitro or ex-vivo as defined herein, said method comprising the administration to a neoplastic cell of an effective amount of a pharmaceutical association, combination or composition as defined herein.

[0739] Ex-vivo administration: As used herein, unless indicated otherwise or contradictory in context, the term “ex-vivo administration” refers to performing the regulatory step outside of the subject/patient, such as administering a pharmaceutical association, combination or composition as defined herein to a population of cells (e.g., neoplastic cells) removed from a subject/patient for e.g. diagnostic, analysis and/or academic purposes.

[0740] In-vivo administration: In one example, pharmaceutical, prophylactic, diagnostic, or imaging associations, combinations or compositions are administered by one or more of a variety of routes, including oral, intravenous, intramuscular, intra-arterial, intramedullary, rectal, intravaginal, intrathecal, subcutaneous, intraventricular, transdermal, intradermal, intraperitoneal, topical (e.g. by ointments, creams, powders, lotions, gels, and/or drops), buccal, enteral, mucosal, nasal, vitreal, intratumoral, sublingual, by intra-tracheal instillation, bronchial instillation, and/or inhalation, as an oral spray, nasal spray, and/or aerosol, and/or through a portal vein catheter. In one example, pharmaceutical, prophylactic, diagnostic, or imaging associations, combinations or compositions are administered by systemic intravenous injection. In one example, pharmaceutical, prophylactic, diagnostic, or imaging associations, combinations or compositions may be administered in a way which allows them to cross the blood-brain barrier, vascular barrier, or other epithelial barrier. In one most particular example, pharmaceutical, prophylactic, diagnostic, or imaging associations, combinations or compositions may be administered locally by intratumoral administration.

[0741] Delivery: As used herein, unless indicated otherwise or contradictory in context, the term “delivery” refers to the act or manner of delivering a compound, substance, association, combination, composition, entity, moiety, cargo or payload.

[0742] Delivery Agent: As used herein, unless indicated otherwise or contradictory in context, the term “delivery agent” refers to any substance which facilitates, at least in part, the in vivo delivery of a pharmaceutical association, combination or composition defined herein to targeted cells.

[0743] Forms suitable for oral administration: A pharmaceutical association, combination or composition for uses and methods of the invention, for example, in certain embodiments, includes forms suitable for oral administration as a tablet, capsule, pill, powder, sustained release formulations, solution, suspension, or for parenteral injection as a sterile solution, suspension or emulsion. Pharmaceutical compositions suitable for the delivery of pharmaceutical associations or combinations defined herein and methods for their preparation will be readily apparent to those skilled in the art. Such compositions and methods for their preparation may be found, for example, in certain embodiments, in ‘Remington's Pharmaceutical Sciences’, 19th Edition (Mack Publishing Company, 1995), which is hereby incorporated by reference in its entirety. Oral administration may involve swallowing, so that the compounds or associations enters the gastrointestinal tract, or buccal or sublingual administration may be employed by which the compound enters the blood stream directly from the mouth. Formulations suitable for oral administration include solid formulations, such as tablets, capsules containing particulates, liquids, or powders; lozenges (including liquid-filled), chews; multi- and nano-particulates; gels, solid solution, liposome, films (including muco-adhesive), ovules, sprays and liquid formulations. Liquid formulations include suspensions, solutions, syrups and elixirs. Such formulations may be employed as fillers in soft or hard capsules and typically comprise a carrier, for example, in certain embodiments, water, ethanol, polyethylene glycol, propylene glycol, methylcellulose, or a suitable oil, and one or more emulsifying agents and/or suspending agents. Liquid formulations may also be prepared by the reconstitution of a solid, for example, in certain embodiments, from a sachet. The pharmaceutical associations defined herein may also be used in fast-dissolving, fast-disintegrating dosage forms such as those described in the art.

[0744] Forms suitable for parenteral administration: In one example, the pharmaceutical association, combination or composition for uses and methods of the invention may be administered by parenteral injection. Exemplary parenteral administration forms include sterile solutions, suspensions or emulsions of the pharmaceutical association defined herein in sterile aqueous media, for example, in certain embodiments, aqueous propylene glycol or dextrose. In another embodiment, the parenteral administration form is a solution. Such parenteral dosage forms can be suitably buffered, if desired. Preferred sterile solutions include sodium chloride, 0.9%, UPS solution. Injectable formulations can be sterilized, for example, in certain embodiments, by filtration through a bacterial-retaining filter, and/or by incorporating sterilizing agents in the form of sterile solid compositions which can be dissolved or dispersed in sterile water or other sterile injectable medium prior to use.

[0745] Forms suitable for rectal and vaginal administration: Compositions for rectal or vaginal administration are typically suppositories which can be prepared by mixing compositions with suitable non-irritating excipients such as cocoa butter, polyethylene glycol or a suppository wax which are solid at ambient temperature but liquid at body temperature and therefore melt in the rectum or vaginal cavity and release the active ingredient.

[0746] Forms suitable for topical and/or transdermal administration: Dosage forms for topical and/or transdermal administration of a composition may include ointments, pastes, creams, lotions, gels, powders, solutions, sprays, inhalants and/or patches. Generally, an active ingredient is admixed under sterile conditions with a pharmaceutically acceptable excipient and/or any needed preservatives and/or buffers as may be required.

[0747] Forms suitable for pulmonary administration: Dosage forms for pulmonary administration via the buccal cavity may comprise dry particles which comprise the active ingredient (e.g. the pharmaceutical association defined herein) and which have a diameter in the range from about 0.5 nm to about 7 nm. Such compositions are conveniently in the form of dry powders for administration using a device comprising a dry powder reservoir to which a stream of propellant may be directed to disperse the powder and/or using a self-propelling solvent/powder dispensing container such as a device comprising the active ingredient dissolved and/or suspended in a low-boiling propellant in a sealed container. Pharmaceutical compositions formulated for pulmonary delivery may provide an active ingredient in the form of droplets of a solution and/or suspension. Such formulations may be prepared, packaged, and/or sold as aqueous and/or dilute alcoholic solutions and/or suspensions, optionally sterile, comprising active ingredient, and may conveniently be administered using any nebulization and/or atomization device. Such formulations may further comprise one or more additional ingredients including, but not limited to, a flavoring agent such as saccharin sodium, a volatile oil, a buffering agent, a surface active agent, and/or a preservative such as methylhydroxybenzoate.

[0748] Forms suitable for nasal administration: Formulations described herein as being useful for pulmonary delivery are also useful for intranasal delivery of a pharmaceutical composition. Formulations suitable for nasal administration may, for example, in certain embodiments, comprise from about as little as 0.1% (w/w) and as much as 100% (w/w) of active ingredient (e.g. the pharmaceutical association defined herein), and may comprise one or more of the additional ingredients described herein. A pharmaceutical composition may be prepared, packaged, and/or sold in a formulation suitable for buccal administration. Such formulations may, for example, in certain embodiments, be in the form of tablets and/or lozenges made using conventional methods, and may, for example, in certain embodiments, 0.1% to 20% (w/w) active ingredient, the balance comprising an orally dissolvable and/or degradable composition and, optionally, one or more of the additional ingredients described herein. Alternately, formulations suitable for buccal administration may comprise a powder and/or an aerosolized and/or atomized solution and/or suspension comprising active ingredient. Such powdered, aerosolized, and/or aerosolized formulations, when dispersed, may have an average particle and/or droplet size in the range from about 0.1 nm to about 200 nm, and may further comprise one or more of any additional ingredients described herein.

[0749] Forms suitable for ophthalmic administration: Dosage forms for ophthalmic administration include, for example, in certain embodiments, eye drops including, for example, in certain embodiments, a 0.1/1.0% (w/w) solution and/or suspension of the active ingredient (e.g. the pharmaceutical association defined herein) in an aqueous or oily liquid excipient. Such drops may further comprise buffering agents, salts, and/or one or more other of any additional ingredients described herein. Other ophthalmically-administrable formulations which are useful include those which comprise the active ingredient in microcrystalline form and/or in a liposomal preparation. Ear drops and/or eye drops are contemplated as being within the scope of this present disclosure.

[0750] Direct injection: One preferred administration method for delivering a pharmaceutical association, combination or composition as defined herein is by local administration, in particular, by direct injection. Direct injection techniques are particularly useful for administering a composition to a cell or tissue that is accessible by surgery, and particularly, on or near the surface of the body. Administration of a composition locally within the area of a target cell refers to injecting the composition centimeters and preferably, millimeters from the target cell or tissue.

[0751] Dosage regimens: The dosage regimen of the pharmaceutical associations or combinations and/or pharmaceutical compositions as defined herein may be adjusted to provide the optimum desired response. For example, in certain embodiments, a single bolus may be administered, several divided doses may be administered over time or the dose may be proportionally reduced or increased as indicated by the exigencies of the therapeutic situation. The appropriate dosing regimen, the amount of each dose administered and/or the intervals between doses will depend upon the pharmaceutical association being used, the type of pharmaceutical composition, the characteristics of the subject in need of treatment and the severity of the condition being treated. Thus, the skilled artisan would appreciate, based upon the disclosure provided herein, that the dose and dosing regimen is adjusted in accordance with methods well-known in the therapeutic arts. That is, the maximum tolerable dose can be readily established, and the effective amount providing a detectable therapeutic benefit to a patient may also be determined, as can the temporal requirements for administering each agent to provide a detectable therapeutic benefit to the patient. Accordingly, while certain dose and administration regimens are exemplified herein, these examples in no way limit the dose and administration regimen that may be provided to a patient in practicing the present invention. In general, pharmaceutical compositions in accordance with the present disclosure may be administered at dosage levels sufficient to deliver from about 0.0001 mg/kg to about 100 mg/kg, from about 0.01 mg/kg to about 50 mg/kg, from about 0.1 mg/kg to about 40 mg/kg, from about 0.5 mg/kg to about 30 mg/kg, from about 0.01 mg/kg to about 10 mg/kg, from about 0.1 mg/kg to about 10 mg/kg, or from about 1 mg/kg to about 25 mg/kg, of subject body weight per day, one or more times a day, to obtain the desired therapeutic, diagnostic, prophylactic, or imaging effect. The desired dosage may be delivered three times a day, two times a day, once a day, every other day, every third day, every week, every two weeks, every three weeks, or every four weeks. In certain embodiments, the desired dosage may be delivered using multiple administrations (e.g., two, three, four, five, six, seven, eight, nine, ten, eleven, twelve, thirteen, fourteen, or more administrations). It is to be further understood that for any particular subject, specific dosage regimens should be adjusted over time according to the individual need and the professional judgment of the person administering or supervising the administration of the compositions, and that dosage ranges set forth herein are exemplary only and are not intended to limit the scope or practice of the present invention. For example, in certain embodiments, doses may be adjusted based on pharmacokinetic or pharmacodynamic parameters, which may include clinical effects such as toxic effects and/or laboratory values. Thus, the present invention encompasses intra-patient dose-escalation as determined by the skilled artisan. Determining appropriate dosages and regiments for administration of the chemotherapeutic agent are well-known in the relevant art and would be understood to be encompassed by the skilled artisan once provided the teachings disclosed herein.

[0752] Effective dose parameters: The dosage regimen of the pharmaceutical associations or combinations and/or pharmaceutical compositions as defined herein may be adjusted to obtain effective dose parameters. Effective dose parameters can be determined using methods standard in the art for a particular disease or condition. In particular, the effectiveness of dose parameters of a therapeutic composition as defined herein when treating cancer can be determined by assessing response rates. Such response rates refer to the percentage of treated patients in a population of patients that respond with either partial or complete remission. Remission can be determined by, for example, in certain embodiments, measuring tumor size or microscopic examination for the presence of cancer cells in a tissue sample.

[0753] A pharmaceutical composition as defined herein may be prepared, packaged, or sold in bulk, as a single unit dose, or as a plurality of single unit doses.

[0754] Unit dose: As used herein, unless indicated otherwise or contradictory in context, the term “unit dose” refers to a discrete amount of the pharmaceutical composition comprising a predetermined amount of the active ingredient. The amount of the active ingredient is generally equal to the dosage of the active ingredient which would be administered to a subject or a convenient fraction of such a dosage such as, for example, in certain embodiments, one-half or one-third of such a dosage.

[0755] Single unit dose: As used herein, unless indicated otherwise or contradictory in context, the term “single unit dose” refers to a dose of any therapeutic association or composition administered in one dose/at one time/single route/single point of contact, i.e., single administration event.

[0756] Split dose: As used herein, unless indicated otherwise or contradictory in context, the term “split dose” refers to the division of single unit dose or total daily dose into two or more doses.

[0757] Total daily dose: As used herein, unless indicated otherwise or contradictory in context, the term “total daily dose” refers to an amount given or prescribed in 24 hr period. It may be administered as a single unit dose.

[0758] The relative amounts of the active ingredient(s), the pharmaceutically acceptable excipients, carriers or vehicles, and any additional ingredients in a pharmaceutical composition defined herein will vary, depending upon the identity, size, and condition of the subject treated and further depending upon the route by which the composition is to be administered. In addition to the active ingredient, a pharmaceutical composition of the invention may further comprise one or more additional pharmaceutically active agents.

[0759] Combination therapy: Compounds, associations, compositions or formulations defined herein may be used in combination with one or more other therapeutic, prophylactic, diagnostic, or imaging agents. As used herein, the term “in combination with” is not intended to imply that the agents must be administered at the same time and/or formulated for delivery together, although these methods of delivery are within the scope of the present disclosure. Compositions can be administered concurrently with, prior to, or subsequent to, one or more other desired therapeutics or medical procedures. In some embodiments, they are administered within about 90, 60, 30, 15, 10, 5, or 1 minute of one another. In some embodiments, the administrations of the agents are spaced sufficiently closely together such that a combinatorial (e.g., a synergistic) effect is achieved. In general, each agent will be administered at a dose and/or on a time schedule determined for that agent. In one example, the present disclosure encompasses the delivery of pharmaceutical, prophylactic, diagnostic, or imaging compositions in combination with agents that improve their bioavailability, reduce and/or modify their metabolism, inhibit their excretion, and/or modify their distribution within the body. It will further be appreciated that therapeutically, prophylactically, diagnostically, or imaging active agents used in combination may be administered together in a single composition or administered separately in different compositions. In general, it is expected that agents used in combination with be used at levels that do not exceed the levels at which they are used individually. In one example, the levels used in combination will be lower than those utilized individually. The particular combination of therapies to employ in a combination regimen will take into account compatibility of the desired therapeutics and/or procedures and the desired therapeutic effect to be achieved. It will also be appreciated that the therapies employed may achieve a desired effect for the same disorder (For example, in certain embodiments, a composition useful for treating cancer in accordance with the present disclosure may be administered concurrently with a chemotherapeutic agent), or they may achieve different effects (e.g., control of any adverse effects).

[0760] Although the descriptions of pharmaceutical associations, combinations or compositions provided herein are principally directed to pharmaceutical associations, combinations or compositions which are suitable for administration to mammals, in particular humans, it will be understood by the skilled artisan that such compositions are generally suitable for administration to animals of all sorts, in particular to any member of the Vertebrate class. Modification of pharmaceutical compositions suitable for administration to humans in order to render the compositions suitable for administration to various animals is well understood, and the ordinarily skilled veterinary pharmacologist can design and/or perform such modification with merely ordinary, if any, experimentation. Subjects to which administration of the pharmaceutical compositions is contemplated include, but are not limited to, humans and/or other primates; mammals, including commercially relevant mammals such as cattle, pigs, horses, sheep, cats, dogs, mice, and/or rats; and/or birds, including commercially relevant birds such as chickens, ducks, geese, and/or turkeys.

### X. Dermatological Applications

[0761] When the neoplastic disease to be prevented or treated involves neoplastic cells belonging to the skin cell lineage (mainly to the fibroblast lineage), the pharmaceutical composition defined herein may be a dermatological composition comprising a pharmaceutical association or combination of a GFR-binding compound and a bioactive carrier as all defined herein and at least one dermatologically acceptable excipient.

[0762] For example, in certain embodiments, a dermatological composition for the uses of the invention may contain between 0.01% and 100% by weight (over the total weight of the dermatological composition) of a GFR-binding compound or pharmaceutical association or combination, both as defined herein, as a dermatological effective amount. The dermatological composition particularly comprises between 0.01% and 95%, between 0.01% and 90%, between 0.01% and 85%, between 0.01% and 80%, between 0.01% and 75%, between 0.01% and 70%, between 0.01% and 65%, between 0.01% and 60%, between 0.01% and 55%, between 0.01% and 50%, between 0.01% and 45%, between 0.01% and 40%, between 0.01% and 35%, between 0.01% and 30%, between 0.01% and 25%, between 0.01% and 20%, between 0.01% and 15%, between 0.01% and 10%, between 0.01% and 5%, between 0.1% and 100%, between 0.1% and 95%, between 0.1% and 90%, between 0.1% and 85%, between 0.1% and 80%, between 0.1% and 75%, between 0.1% and 70%, between 0.1% and 65%, between 0.1% and 60%, between 0.1% and 55%, between 0.1% and 50%, between 0.1% and 45%, between 0.1% and 40%, between 0.1% and 35%, between 0.1% and 30%, between 0.1% and 25%, between 0.1% and 20%, between 0.1% and 15%, between 0.1% and 10%, and between 0.1% and 5% by weight (over the total weight of the dermatological composition) of any one of a GFR-binding compound or a pharmaceutical association or combination.

[0763] Dermatologically acceptable: As used herein, unless indicated otherwise or contradictory in context, the term “dermatologically acceptable” means that the compound(s) or pharmaceutical association(s) used are adapted for use in contact with human skin without undue toxicity, incompatibility, instability, allergic response, or their equivalents.

[0764] Dermatological formulations: Suitable formulation for implementing dermatological embodiments of the invention include an aqueous or oil-based solution, a water-based cream or gel or an oily gel, usually in a jar or a tube, particularly a shower gel, shampoo, milk, emulsion, microemulsion or nanoemulsion, particularly oil-in-water or water-in-oil or multiple of silicone-based; a lotion, particularly in a glass or plastic bottle of a spray or aerosol bottle, a blister-pack, liquid soap, a dermatological bar of soap, a pomade, mousse, an anhydrous product, preferably liquid, cream or solid, for example in the form of a stick, particularly in the form of lipstick, a cataplasm or a patch.

[0765] Preferred administration routes include, but are not limited to, topical, intradermal and intra-tumoral as already defined herein.

[0766] Dermatologically acceptable excipients: Suitable dermatologically acceptable excipients for implementing embodiments of the invention include, but are not limited to, preservatives, emollients, emulsifiers, surfactants, moisturizers, thickeners, conditioners, mattifying agents, stabilizers, antioxidants, texturizing agents, shine agents, filmogenic agents, solubilizers, pigments, colorants, perfumes, and solar filters. These excipients are preferably chosen from among the group consisting of amino acids and their derivatives, polyglycerols, esters, polymers and cellulose derivatives, lanoline derivatives, phospholipids, lactoferrins, lactoperoxidases, sucrose-based stabilizers, vitamin E and its derivatives, natural and synthetic waxes, vegetable oils, triglycerides, insaponifiables, phytosterols, plant esters, silicones and their derivatives, protein hydrolysates, jojoba oil and its derivatives, lipo/hydrosoluble esters, betaines, aminoxides, saccharose ester plant extracts, titanium dioxides, glycines, parabens, and even more preferably from among the group consisting of butylene glycol, glycol-15 stearyl ether, cetearyl alcohol, phenoxyethanol, methylparaben, propylparaben, butylparaben, butylenes glycol, natural tocopherols, glycerine, dihydroxycetyl sodium phosphate, isopropyl hydroxycetyl ether, le glycol stearate, triisononanoin, octyl cocoate, polyacrylamide, isoparaffin, laureth-7, carbomer, propylene glycol, glycerol, bisabolol, dimethicone, sodium hydroxide, PEG 30-dipolyhydroxysterate, capric/caprylic triglycerides, cetearyl octanoate, dibutyl adipate, grapeseed oil, jojoba oil, magnesium sulfate, EDTA, cyclomethicone, xanthan gum, citric acid, sodium lauryl sulfate, mineral waxes and oils, isostearyl isostearate, dipelargonate of propylene glycol, isostearate of propylene glycol, PEG 8, beeswax, glyceride of hydrogenated palm kernel oil, lanolin oil, sesame oil, cetyl lactate, lanolin alcohol, titanium dioxide, lactose, saccharose, low-density polyethylene, and isotonic salt solution.

[0767] In one example, the dermatological composition as defined herein may contain at least one other active agents and/or excipients and/or additives of pharmaceutical, especially dermatological, interest such as agents with the following properties:
[0768] wound-healing properties; such as panthenol and derivatives thereof, for example ethyl panthenol, aloe vera, pantothenic acid and derivatives thereof, allantoin, bisabolol, and dipotassium glycyrrhizinate;
[0769] anti-inflammatory properties: such as steroidal and non-steroidal antiinflammatories, in particular Inhibitors of the production of cytokines and chemokines, of cyclooxygenase, of nitric oxide (NO) and nitric oxide synthase (NOS). As an example of anti-inflammatory products, mention may be made of extracts of Ginkgo biloba, trilactone terpenes such as ginkgolides, especially ginkgolide B and bilobalide known for their platelet-activating factor (PAF) antagonist properties.

[0770] The CTFA Cosmetic Ingredient Handbook, Second Edition (1992), which is hereby incorporated by reference in its entirety, describes different cosmetic and pharmaceutical ingredients currently used in the cosmetic and pharmaceutical industry that are particularly adapted to topical use and which may be used in a dermatological composition of the invention. Examples of these types of ingredients include but are not limited to the following compounds: abrasives, absorbent compounds, compounds with aesthetic purposes such as perfumes, pigments, colorants, essential oils, astringents, etc. (for example: clove oil, menthol, camphor, eucalyptus oil, eugenol, menthyl lactate, and hamelis distillate), anti-acne agents, anti-flocculant agents, anti-foaming agents, anti-microbial agents (for example iodopropyl butylcarbamate), les antioxidants, bonding agents, biological additives, tampon agents, swelling agents, chelatants, additives, biocidal agents, denaturants, external analgesics, film-forming materials, polymers, opacifying agents, pH adjusters, reducing agents, depigmenting or lightening agents (for example: hydroquinone, kojic acid, ascorbic acid, magnesium ascorbyl phosphate, ascorbyl glucosamine), conditioning agents (for example: humectants), calming agents for the skin and/or scarring agents (for example: panthenol and its derivatives, for example ethyl panthenol), aloe vera, pantothenic acid and its derivatives, allantoin, bisabolol and dipotassium glycyrrhizinate), thickeners, vitamins, and the derivatives or equivalents of these.

[0771] In one aspect, the present disclosure provides a pharmaceutical association or combination as defined herein or a dermatological composition as defined herein for use in converting a neoplastic skin cell (i.e. any cell belonging to the fibroblast lineage as defined herein) into a non-neoplastic skin cell, in particular into a functional and/or healthy skin cell.

[0772] In one aspect, the present disclosure provides a pharmaceutical association or combination as defined herein or a dermatological composition as defined herein for use in protecting (i.e. preventing and/or treating) a subject or patient from a skin neoplastic disease, disorder or condition, in particular, but not limited to, basal and squamous cell skin cancers, melanoma skin cancer, Merkel cell carcinoma, lymphoma of the skin and Kaposi sarcoma.

[0773] Suitable as amounts of pharmaceutical association for implementing embodiments of the invention in the dermatological field include the group consisting of between about 0.0001 □g/day to about 5000 mg/day, between about 0.0001 mg/day to about 1000 mg/day, between about 0.0001 mg/day to about 10 mg/day, between about 0.0001 mg/day to about 1 mg/day, or between about 0.0001 mg/day to about 100 mg/day, all being preferred for implementing embodiments of the invention.

[0774] Advantageously, the subject who has need thereof is a subject chosen from a population having an average age of more than 30 years old or who has had sunlight over-exposure, has a family history of skin cancer, has or has had certain other skin conditions or previous radiotherapy, has been exposed to certain chemicals and has a weakened immune system.

### XI. Ophthalmic Applications

[0775] Preferable dosage forms for the pharmaceutical association, combination or composition as defined herein for treating ophthalmic neoplastic diseases, disorders or conditions include, for example, in certain embodiments, eye drops and eye ointments. These can be prepared using conventional techniques. For instance, eye drops may be prepared, using isotonic agents such as sodium chloride, buffers such as sodium phosphate, and preservatives such as benzalkonium chloride. A suitable pH is within an ophthalmologically acceptable range. Preferred pH is within pH 4 to 8.

[0776] Particularly preferred administration routes include vitreal, intraocular and intra-tumoral.

[0777] A suitable dose of pharmaceutical association, combination or composition for treating eye disorders is appropriately selected, depending on the symptoms, age of patients, dosage form and the like. For eye drops, suitable concentration may be 0.0001 to 10 w/v %, preferably 0.0001 to 0.01 w/v % for administration into eyes once or several times a day.

### XII. Surgical Treatments

[0778] In one aspect, the pharmaceutical association, combination or composition as defined herein may be used in a surgical method suitable for treating or preventing a neoplastic disease such as a tumour or a cancer.

[0779] In one aspect, the present disclosure provides a surgical method for surgical treatment of a neoplastic disease comprising the provision of a pharmaceutical association, combination or composition as defined herein, and the contacting or administration of said pharmaceutical association, combination or composition with a body part of a patient to be treated.

[0780] For example, in certain embodiments, the surgical treatment of the invention may include the provision of a placement, insertion or depositing device and the contacting of said pharmaceutical association, combination or composition with a body part of a patient using said placement, insertion or depositing device.

[0781] In one example, said placement, insertion or depositing device comprises an injection device such as a syringe, and comprises the positioning of said pharmaceutical association, combination or composition inside said injection device for injection into a subject/patient or into a body part of a subject/patient.

### XIII. Pharmaceutical Applications, Uses and Methods

[0782] The present invention provides for uses and methods of converting or inducing the conversion or the recoding of a neoplastic cell (e.g. a cancer cell) into a non-neoplastic cell (e.g. a non-cancerous cell) through extracellular, non-mutagenic, conversion or recoding of said neoplastic cell. In other words, the present disclosure provides methods for a neoplastic cell to perform self-healing or self-recovery into a more functional, healthy, non-neoplastic cell.

[0783] Conveniently, such a self-healing process is generally achieved within less than 7 days. In particular, such a self-healing process is generally achieved within less than 6 days. In particular, such a self-healing process is generally achieved within less than 5 days. In particular, such a self-healing process is generally achieved within less than 4 days. In particular, such a self-healing process is generally achieved within less than 3 days. In particular, such a self-healing process is generally achieved within less than 2 days. In particular, such a self-healing process is generally achieved within less than 24 hours. In particular, such a self-healing process is generally achieved within less than 18 hours.

[0784] Conveniently, such a self-healing process is achieved with a cell conversion yield greater than about 50%. In particular, such a self-healing process is achieved with a cell conversion yield greater than about 60%. In particular, such a self-healing process is achieved with a cell conversion yield greater than about 70%. In particular, such a self-healing process is achieved with a cell conversion yield greater than about 80%. In particular, such a self-healing process is achieved with a cell conversion yield greater than about 90%. In particular, such a self-healing process is achieved with a cell conversion yield greater than about 95%. In particular, such a self-healing process is achieved with a cell conversion yield is about 100%.

[0785] Cell conversion yield: As used herein, “cell conversion yield” means the percentage of neoplastic cells that are transformed into non-neoplastic cells. It is considered significant when it is higher than 10%. There are many ways to measure a cell conversion yield, but for the purpose of the present disclosure, and for the avoidance of any doubts, the cell conversion yield is herein measured by using a haemocytometer for precise cell counting using, for instance, a haemocytometer from Baxter Scientific and following the standard procedure below:
[0786] (a) Cleaning the chamber and cover slip with alcohol. Drying and fixing the coverslip in position.
[0787] (b) Harvesting the cells. Adding 10 μL of the cells to the haemocytometer.
[0788] (c) Placing the chamber in the inverted microscope under a 10× objective. Using phase contrast to distinguish the cells.
[0789] (d) Counting the cells in the large, central gridded square (1 mm²). The gridded square is circled in the graphic below. Multiplying by 104 to estimate the number of cells per mL.
[0790] (e) Preparing duplicate samples and averaging the count.

[0791] In certain embodiments, the present disclosure provides methods to convert a neoplastic cell into a non-neoplastic cell, wherein said obtained neoplastic cell is homogeneous and/or of substantially the same differentiation state. Conveniently, the converted non-neoplastic cells obtained using a method as defined herein, have a homogeneity of greater than 20%. In particular, the converted non-neoplastic cells obtained using a method as defined herein, have a homogeneity of greater than 50%. In particular, the converted non-neoplastic cells obtained using a method as defined herein, have a homogeneity of greater than 70%. In particular, the converted non-neoplastic cells obtained using a method as defined herein, have a homogeneity of greater than 90%. In particular, the converted non-neoplastic cells obtained using a method as defined herein, have a homogeneity of greater than 99%.

[0792] Homogeneous: As used herein, “homogeneous”, when used in relation to a non-neoplastic cell population obtained using methods as defined herein, means that substantially all of the obtained non-neoplastic cells within the population are in a G0 phase. There are many ways to test and measure the homogeneity of a cell population, but for the purpose of the present disclosure, and for the avoidance of any doubts, the cell homogeneity is herein measured using cell immunofluorescence staining by detecting phosphorylation of the Rb protein, an absence of phosphorylation meaning that substantially all cells are in a G0 phase.

[0793] Conveniently, the converted non-neoplastic cells obtained using a method as defined herein, are more than 20% identical. In particular, the converted non-neoplastic cells obtained using a method as defined herein, are more than 50% identical. In particular, the converted non-neoplastic cells obtained using a method as defined herein, are more than 70% identical. In particular, the converted non-neoplastic cells obtained using a method as defined herein, are more than 90% identical. In particular, the converted non-neoplastic cells obtained using a method as defined herein, are more than 99% identical.

[0794] As used herein, “substantially the same differentiation state” or “substantially identical differentiation state”, when used in relation to non-neoplastic cells obtained using methods as defined herein, means exhibiting the same gene expression pattern. There are many ways to test and measure the differentiation state of a cell and group of cells, but for the purpose of the present disclosure, and for the avoidance of any doubts, the differentiation state of a cell or a group of cell is herein measured using RT-PCR for the quantification of the expression of well-defined marker genes for the particular differentiation state.

[0795] In certain aspects, a pharmaceutical association, combination or composition as defined herein is thus useful in the protection of a subject/patient from (e.g. in the treatment and/or prevention of) a neoplastic disease, condition, disorder or pathology and/or at least one symptom thereof such as tumors and cancers. In one aspect, the present disclosure provides a pharmaceutical association, combination or (therapeutic, dermatologic, ophthalmologic, diagnostic, etc.) composition defined herein for use in the treatment of a neoplastic disease, condition, disorder or pathology and/or at least one symptom thereof, said composition comprising a GFR-binding compound and a bioactive carrier, all as already defined herein. Also provided is a method of treating a neoplastic disease, comprising administering to a subject in need thereof an effective amount of a pharmaceutical association, combination or (therapeutic, dermatologic, ophthalmologic, diagnostic, etc.) composition as defined herein.

[0796] In one aspect, the present disclosure provides a pharmaceutical association, combination or (therapeutic, dermatologic, ophthalmologic, diagnostic, etc.) composition defined herein for use in a method of converting or recoding a neoplastic cell to induce and/or promote and/or improve self-healing and/or self-recovery thereof. Also provided is a method of converting or recoding a neoplastic cell to induce and/or promote and/or improve self-healing and/or self-recovery thereof, comprising administering to a subject in need thereof an effective amount of a pharmaceutical association, combination or (therapeutic, dermatologic, ophthalmologic, diagnostic, etc.) composition as defined herein.

[0797] In one example, the conversion or recoding of the neoplastic cell into a non-neoplastic cell is substantially permanent. As used herein, the term “permanent”, when used in relation to the conversion or recoding of a neoplastic cell into a non-neoplastic cell, means physiologically permanent conversion as the neoplastic cell treated by the method of the invention then becomes a normal, functional, healthy cell just like any other non-neoplastic cell of the subject's body and is thus not prevented to develop a new neoplastic state or any other abnormal state in the future (like any normal cell could/would).

[0798] In one aspect, the present disclosure provides a pharmaceutical association, combination or (therapeutic, dermatologic, ophthalmologic, diagnostic, etc.) composition defined herein for use in a method of restoring the ability of a neoplastic cell to undergo differentiation. Also provided is a method of restoring the ability of a neoplastic cell to undergo differentiation, comprising administering to a subject in need thereof an effective amount of a pharmaceutical association, combination or (therapeutic, dermatologic, ophthalmologic, diagnostic, etc.) composition as defined herein.

[0799] In one aspect, the present disclosure provides a pharmaceutical association, combination or (therapeutic, dermatologic, ophthalmologic, diagnostic, etc.) composition defined herein for use in a method of converting and/or recoding a circulating or non-circulating neoplastic cell such as a metastatic or non-metastatic cancer cell, into a non-neoplastic cell. Also provided is a method of converting and/or recoding a circulating or non-circulating neoplastic cell such as a metastatic or non-metastatic cancer cell, into a non-neoplastic cell, comprising administering to a subject in need thereof an effective amount of a pharmaceutical association, combination or (therapeutic, dermatologic, ophthalmologic, diagnostic, etc.) composition as defined herein.

[0800] In one aspect, the present disclosure provides a pharmaceutical association, combination or (therapeutic, dermatologic, ophthalmologic, diagnostic, etc.) composition defined herein for use in a method of providing and/or producing and/or inducing the formation of a physiologically functional and/or healthy cell of the bone, cartilage, vascular, blood, fibroblast, muscle, neural, epithelial, renal, retinal cell lineage from a neoplastic cell. Also provided is a method of providing and/or producing and/or inducing the formation of a physiologically functional and/or healthy cell of the bone, cartilage, vascular, blood, fibroblast, muscle, neural, epithelial, renal, retinal cell lineage from a neoplastic cell, comprising administering to a subject in need thereof an effective amount of a pharmaceutical association, combination or (therapeutic, dermatologic, ophthalmologic, diagnostic, etc.) composition as defined herein.

[0801] In one aspect, the present disclosure provides a pharmaceutical association, combination or (therapeutic, dermatologic, ophthalmologic, diagnostic, etc.) composition defined herein for use in a method of inducing and/or promoting and/or enhancing neoplastic cell differentiation. Also provided is a method of inducing and/or promoting and/or enhancing neoplastic cell differentiation, comprising administering to a subject in need thereof an effective amount of a pharmaceutical association, combination or (therapeutic, dermatologic, ophthalmologic, diagnostic, etc.) composition as defined herein.

[0802] In one aspect, the present disclosure provides a pharmaceutical association, combination or (therapeutic, dermatologic, ophthalmologic, diagnostic, etc.) composition defined herein for use in a method of non-mutagenically protecting a subject from a neoplastic disease i.e. without modifying or altering the genome of the treated neoplastic cells. Also provided is a method of non-mutagenically protecting a subject from a neoplastic disease i.e. without modifying or altering the genome of the treated neoplastic cells, comprising administering to a subject in need thereof an effective amount of a pharmaceutical association, combination or (therapeutic, dermatologic, ophthalmologic, diagnostic, etc.) composition as defined herein.

[0803] In one aspect, the present disclosure provides a pharmaceutical association, combination or (therapeutic, dermatologic, ophthalmologic, diagnostic, etc.) composition defined herein for use in a method of extracellular treatment of a neoplastic disease, disorder, condition, pathology, or any symptoms thereof. Also provided is a method of extracellular treatment of a neoplastic disease, disorder, condition, pathology, or any symptoms thereof, comprising administering to a subject in need thereof an effective amount of a pharmaceutical association, combination or (therapeutic, dermatologic, ophthalmologic, diagnostic, etc.) composition as defined herein.

[0804] An extracellular treatment as used herein implies a biological action/effect to be provided or to occur outside the cell to be treated (i.e. a neoplastic cell). In other words, the biologically active agent (e.g. the pharmaceutical association, combination or composition as defined herein) delivers/provides its biological/pharmaceutical effect to the outside of the cell (e.g. on the cell's surface) without the need to penetrate through the cell membrane, inside the neoplastic cell to be treated. Once the extracellular action/effect has been administered/delivered to the cell to be treated, said active agent may be, for instance, excreted from the host organism with or without being metabolised, and/or tagged to be destroyed through apoptotic routes, and/or internalised by nearby cells, etc. . . . . Without being bound to any specific theory, it is believed that once the extracellular biological action/effect/message/signal has been delivered by the pharmaceutical association or composition defined herein to a neoplastic cell to be treated, said cell then undergo self-healing into a functional, healthy, non-neoplastic cell.

[0805] Data have shown (FIG. 8) that the administration or action of the pharmaceutical association or composition as defined herein on neoplastic cells to be treated, implicates and down-regulates (in particular, reduces, substantially reduces or suppress) the Ras/MAP kinase, FAK/Src kinase and/or PIP2 signalling pathways. Without wishing to be bound to any specific theory, it is conventionally known that these pathways control the expression of cyclins D, which in turn controls the activity of CDKs 4 and/or 6 so that down-regulating (in particular, reducing, significantly reducing or suppressing) the Ras/MAP kinase, FAK/Src kinase and/or PIP2 pathways would inhibit, reduce, damper or suppress the expression of cyclins D and/or CDK4 and CDK6 and/or the formation of the cyclins D-CDK4/6 complexes.

[0806] As already stated herein, cell cycle comprises four main phases: The S phase for DNA duplication, followed by a G2 phase for preparation of the entry into the M phase, the M or mitotic phase wherein the cell divides and finally the G1 phase for cell growth. During the G1 phase the cell makes decisions on whether to continue the cell cycle and undergo cell growth and further divide, or to exit the cycle in the G0 phase and remains quiescent, die or initiate differentiation. The progression through the cell cycle is governed by phosphorylation signals emitted by different bimolecular complexes composed of CDKs and cyclin proteins, both as defined herein.

[0807] The cyclin D-CDK4/6 complexes are capable of leading a cell through the restriction (R)-point which is generally known for controlling the passage of the cell from the G1 phase to the S phase of the cell cycle. This control gate is generally thought to be located at the end of the cell cycle's G1 phase, just before entry into S phase, and is involved in the decision of whether the cell should divide or proliferate, delay division, or enter the G0 resting state.

[0808] This control gate ensures that a series of surveillance or monitoring mechanisms are completed successfully before proceeding through to the next phase. These monitoring mechanisms are also commonly termed “checkpoints” or “checkpoint controls”. If a checkpoint is not validated by the control gate, the cell should halt further advance through the cell cycle and enter the G0 phase. However, neoplastic cells, such as cancer cells, have developed mechanisms that somehow “disconnect” or “impair” one or more checkpoints from the control gate so that the cell is “tricked to “believe that all checkpoints are validated (or, in other words, “tricked to ignore” the non-validated status of relevant checkpoints) and thus never or rarely enter into the G0 phase.

[0809] Without wishing to be bound to any specific theory, it is thought that the pharmaceutical associations, combination or composition as defined herein can restore or re-establish (the integrity of) one or more impaired cell cycle checkpoints so as to restore the lost ability of a neoplastic cell to detect a malfunction or a defect in the cell cycle regulation, induce the cell cycle arrest and exit the cell cycle in G0.

[0810] One particular checkpoint that the present invention is able to restore is the adhesion checkpoint. In one aspect, the present disclosure provides a pharmaceutical association, combination or (therapeutic, dermatologic, ophthalmologic, diagnostic, etc.) composition defined herein for use in a method of treating a neoplastic cell or a neoplastic disease by restoring the adhesion checkpoint of said neoplastic cell.

[0811] The cell adhesion checkpoint is known to be in charge of monitoring the cells attachments to the extracellular matrix (ECM). When a cell does not detect a “correct” attachment it should halt further advance through the cell cycle and enter the Go phase. The ECM attachment is normally achieved via cell transmembrane proteins, such as the integrins, syndecans and different proteoglycans. The most important among these are the integrins, which assemble as alpha-beta heterodimers. In addition to physically linking the cell to the extracellular matrix, the binding of the extracellular integrin domains to specific components of the ECM activates the integrins and allows binding of different signalling molecules to its intracellular domain. This activates various signalling pathways that mediate signals to the adhesion checkpoint including the Ras/MAP kinase, FAK/Src kinase, and PIP2 pathways. These pathways are involved in the regulation of the expression of cyclins D, which in turn controls the activity of CDK4/6. The cyclins D-CDK4/6 complexes are capable of leading the cell through the R-point gate.

[0812] Data have also shown (FIGS. 8 and 9) that the administration or action of the pharmaceutical association or composition as defined herein on neoplastic cells to be treated down-regulated (in particular, substantially reduced) the expression of FAK genes and proteins and/or MAP kinase and/or reduced (in particular, substantially reduced) the expression or activity of GTPase Ras, Rho (Rho, Rac, Cdc42).

[0813] Focal Adhesion Kinase (FAK) is a cytoplasmic tyrosine kinase that plays a role in integrin-mediated signal transductions and also participates in signalling via other cell surface receptors. FAK is typically located in structures known as focal adhesions. These are multi-protein structures that link the extracellular matrix (ECM) to the cytoplasmic cytoskeleton. FAK is known to be phosphorylated in response to integrin engagement, growth factor stimulation, and the action of mitogenic neuropeptides. This cytosolic kinase has been reported to participate to diverse cellular mechanisms including cell locomotion, mitogen response and cell survival. FAK has four defined regions, or tertiary structure domains. Two of these domains, the N-terminal FERM domain and the Kinase domain, form an auto-inhibitory interaction. This interaction is thought to be the result of hydrophobic interactions between the two domains and prevents the activation of the Kinase domain, thereby preventing the signalling function of FAK. Release of this auto-inhibitory interaction has been shown to occur within focal adhesions but not in the cytoplasm and therefore is thought to require interaction with focal adhesion proteins.

[0814] MAP kinase Mitogen-activated protein kinases or MAP kinases (or MAPK) include a large group of related serine/threonine eukaryotic protein kinases whose regulatory cell functions include proliferation, gene expression, differentiation, mitosis, cell survival, and apoptosis. All have been reported to become activated when they have been phosphorylated at a Tyrosine and a Threonine amino acid. MAP kinases are catalytically inactive in their basic form. In order to become active, (potentially multiple) phosphorylation events is required to occur in their activation loops. MAP kinases typically form multi-step pathways, receiving input signals at several levels above the actual MAP kinase. These pathways can effectively convey stimuli from the cell membrane to the nucleus or to many other subcellular targets.

[0815] GTPases (singular GTPase) are a large family of hydrolase enzymes that can bind and hydrolyze guanosine triphosphate (GTP). The GTP binding and hydrolysis takes place in the highly conserved G domain common to all GTPases. The hydrolysis of the γ phosphate of GTP into guanosine diphosphate (GDP) and Pi, inorganic phosphate, occurs by the SN2 mechanism of nucleophilic substitution via a pentavalent intermediate state and is dependent on the magnesium ion Mg²⁺. Regulatory GTPases, also called the GTPase superfamily, are GTPases used for regulation of other biochemical processes. Most prominent among the regulatory GTPases are the G proteins. Small GTPases have a molecular weight of about 21 kDa and generally serve as molecular switches for a variety of cellular signalling events.

[0816] According to their primary amino acid sequences and biochemical properties, the Ras superfamily is further divided into five subfamilies: Ras, Rho, Rab, Arf and Ran. The Rho subfamily is further divided into RHOA, RAC1, and CDC42.

[0817] Ras/MAP kinase signalling pathway (also known as the Ras-Raf-MEK-ERK pathway) is a chain of proteins in the cell that communicates a signal from a receptor on the surface of the cell to the DNA in the nucleus of the cell. The signal starts when a signalling molecule binds to the receptor on the cell surface and ends when the DNA in the nucleus expresses a protein and produces some change in the cell, such as cell division. The pathway includes many proteins, including MAPK (mitogen-activated protein kinases, originally called ERK, extracellular signal-regulated kinases), which communicate by adding phosphate groups to a neighbouring protein.

[0818] The FAK/Src kinase signalling pathway involves focal adhesion kinase (FAK) and steroid receptor coactivator (Src) which are intracellular (non-receptor) tyrosine kinases that physically and functionally interact to promote a variety of cellular responses. The linked activities of these two kinases are a common intracellular point of convergence in the signalling initiated by the integrin-extracellular matrix (ECM) interaction. Integrins, a family of transmembrane receptors, interact with the ECM and the intracellular actin-cytoskeleton. The integrins cluster upon binding to the ECM to form focal adhesion (FA) contacts. In response to this clustering, FAK associates to the cytoplasmic tail of the integrins and undergoes phosphorylation at its tyrosine 397 residue (Y397). This phosphorylated tyrosine provides a docking site for Src which is then able to phosphorylate additional sites on FAK, leading to a further increase in FAK activity and allowing the recruitment of proteins that contain Src homology 2 (SH2) domains such as Grb2 and PI3K. The mutually activated FAK/Src complex then initiates a cascade of phosphorylation events of new protein-protein interactions to trigger several signalling pathways that eventually leads to different cellular responses.

[0819] Phosphatidylinositol 4,5-bisphosphate or PIP2 is a minor phospholipid component of cell membranes. PIP2 is enriched at the plasma membrane where it is a substrate for a number of important signalling proteins. PIP2 is phosphorylated by the Class I PI 3-kinases. Class I PI 3-kinases are a subgroup of the enzyme family, phosphoinositide 3-kinase that possess a common protein domain structure, substrate specificity, and method of activation. Class I PI 3-kinases are further divided into two subclasses, class IA PI 3-kinases and class IB PI 3-kinases. Class IA PI 3-kinases are activated by receptor tyrosine kinases (RTKs). Class IB PI3-kinases are activated by G-protein-coupled receptors (GPCRs). After their activation these kinases phosphorylate PIP2 to form phosphatidylinositol (3,4,5)-trisphosphate PIP3. Both PIP2 and PIP3 not only act as substrates for enzymes but also serve as docking phospholipids that bind specific domains that promote the recruitment of proteins to the plasma membrane and subsequent activation of signalling cascades. PIP3 functions to activate downstream signalling components, the most notable one being the protein kinase AKT, which activates downstream anabolic signalling pathways required for cell growth and survival.

[0820] Consequently, any associations, combinations or compositions comprising a GFR-binding compound and a bioactive carrier as defined herein, which, when used to convert a neoplastic cell into a non-neoplastic cell and treat/prevent/diagnose a neoplastic disease, down-regulate (in particular, substantially reduce) the expression of FAK genes and proteins and/or MAP kinase and/or reduce (in particular, substantially reduce) the expression or activity of GTPase Ras, Rho (Rho, Rac, Cdc42) in-vitro or in-vivo, shall be considered as being comprised within the scope of the present invention.

[0821] In one aspect, the present disclosure provides a pharmaceutical association, combination or (therapeutic, dermatologic, ophthalmologic, diagnostic, etc.) composition defined herein for use in a method of treating a neoplastic cell or a neoplastic disease by down-regulating (in particular, substantially reducing) the expression of FAK genes and proteins and/or MAP kinase and/or reducing (in particular, substantially reducing) the expression or activity of GTPase Ras, Rho (Rho, Rac, Cdc42) in-vitro or in-vivo. Also provided is a method of treating a neoplastic cell or a neoplastic disease by down-regulating (in particular, substantially reducing) the expression of FAK genes and proteins and/or MAP kinase and/or reducing (in particular, substantially reducing) the expression or activity of GTPase Ras, Rho (Rho, Rac, Cdc42) in-vitro or in-vivo, comprising administering to a subject in need thereof an effective amount of a pharmaceutical association, combination or (therapeutic, dermatologic, ophthalmologic, diagnostic, etc.) composition as defined herein.

[0822] Consequently, in certain embodiments, any associations, combinations or compositions comprising a GFR-binding compound and a bioactive carrier as defined herein, which, when used to convert a neoplastic cell into a non-neoplastic cell and treat/prevent a neoplastic disease, possesses at least one, preferably more than one, of the above defined biological and/or therapeutic parameters or effects (e.g. down-regulation of the Ras/MAP kinase, FAK/Src kinase and/or PIP2 signalling pathways and/or inhibition of gene expression or formation of cyclins D and/or down-regulation of the cyclin D/CDKs complexes), shall be considered as being comprised within the scope of the present invention.

[0823] In one aspect, the present disclosure provides a pharmaceutical association, combination or (therapeutic, dermatologic, ophthalmologic, diagnostic, etc.) composition defined herein for use in a method of converting a neoplastic cell into a non-neoplastic cell or treating/preventing a neoplastic disease by substantially inhibiting, down-regulating or dampening the gene expression or formation of at least one of, in particular a plurality of, the cyclin D proteins. Also provided is a method of converting a neoplastic cell into a non-neoplastic cell or treating/preventing a neoplastic disease by substantially inhibiting, down-regulating or dampening the gene expression or formation of at least one of, in particular a plurality of, the cyclin D proteins, comprising administering to a subject in need thereof an effective amount of a pharmaceutical association, combination or (therapeutic, dermatologic, ophthalmologic, diagnostic, etc.) composition as defined herein.

[0824] In one aspect, the present disclosure provides a pharmaceutical association, combination or (therapeutic, dermatologic, ophthalmologic, diagnostic, etc.) composition defined herein for use in a method of converting a neoplastic cell into a non-neoplastic cell or treating/preventing a neoplastic disease by substantially inhibiting the formation of at least one of, in particular a plurality of, the protein complexes comprising at least one cyclin D and at least one CDK4 or CDK6. Also provided is a method of converting a neoplastic cell into a non-neoplastic cell or treating/preventing a neoplastic disease by substantially inhibiting the formation of at least one of, in particular a plurality of, the protein complexes comprising at least one cyclin D and at least one CDK4 or CDK6, comprising administering to a subject in need thereof an effective amount of a pharmaceutical association, combination or (therapeutic, dermatologic, ophthalmologic, diagnostic, etc.) composition as defined herein.

[0825] In one aspect, the present disclosure provides a pharmaceutical association, combination or (therapeutic, dermatologic, ophthalmologic, diagnostic, etc.) composition as defined herein for use in a method of converting a neoplastic cell into a non-neoplastic cell or treating/preventing a neoplastic disease without inducing the death of said neoplastic cell. Also provided is a method of converting a neoplastic cell into a non-neoplastic cell or treating/preventing a neoplastic disease without inducing the death of said neoplastic cell, comprising administering to a subject in need thereof an effective amount of a pharmaceutical association, combination or (therapeutic, dermatologic, ophthalmologic, diagnostic, etc.) composition as defined herein.

[0826] In one aspect, the present disclosure provides a pharmaceutical association, combination or (therapeutic, dermatologic, ophthalmologic, diagnostic, etc.) composition as defined herein for use as a G0 cell cycle phase inducer.

[0827] In one aspect, the present disclosure provides a pharmaceutical association, combination or (therapeutic, dermatologic, ophthalmologic, diagnostic, etc.) composition for use in a method of converting a neoplastic cell into a non-neoplastic cell or treating/preventing a neoplastic disease by dampening or arresting cell division and/or cell proliferation of said neoplastic cell. Also provided is a method of converting a neoplastic cell into a non-neoplastic cell or treating/preventing a neoplastic disease by dampening or arresting cell division and/or cell proliferation of said neoplastic cell, comprising administering to a subject in need thereof an effective amount of a pharmaceutical association, combination or (therapeutic, dermatologic, ophthalmologic, diagnostic, etc.) composition as defined herein.

[0828] In one aspect, the present disclosure provides a pharmaceutical association, combination or (therapeutic, dermatologic, ophthalmologic, diagnostic, etc.) composition for use in a method of converting a neoplastic cell into a non-neoplastic cell or treating/preventing a neoplastic disease by activating and/or promoting anti-mitogen activity and/or tumor suppressor pathways and/or anti-oncogenic activity in said neoplastic cell. Also provided is a method of converting a neoplastic cell into a non-neoplastic cell or treating/preventing a neoplastic disease by activating and/or promoting anti-mitogen activity and/or tumor suppressor pathways and/or anti-oncogenic activity in said neoplastic cell, comprising administering to a subject in need thereof an effective amount of a pharmaceutical association, combination or (therapeutic, dermatologic, ophthalmologic, diagnostic, etc.) composition as defined herein.

[0829] Data have also shown (FIG. 9) that the administration or action of the pharmaceutical association, combination or composition as defined herein on neoplastic cells to be treated, down-regulated (in particular, substantially reduced) the expression of paxillin and/or up-regulated (in particular, substantially increased) the expression of vinculin.

[0830] Paxillin is a signal transduction adaptor protein. The C-terminal region of paxillin contains four LIM domains that target paxillin to focal adhesions through a direct association with the cytoplasmic tail of beta-integrin. The N-terminal region of paxillin is rich in protein-protein interaction sites. The proteins that bind to paxillin are diverse and include protein tyrosine kinases, such as Src and focal adhesion kinase (FAK), structural proteins, such as vinculin and actopaxin, and regulators of actin organization, such as COOL/PIX and PKL/GIT. Paxillin is tyrosine-phosphorylated by FAK and Src upon integrin engagement or growth factor stimulation, creating binding sites for the adapter protein Crk.

[0831] Vinculin is a focal adhesion protein that is involved in linkage of integrin adhesion molecules to the actin cytoskeleton. Vinculin is a cytoskeletal protein associated with cell-cell and cell-matrix junctions, where it is thought to function as one of several interacting proteins involved in anchoring F-actin to the membrane. Vinculin is a 117-kDa cytoskeletal protein of 1066 amino acids. The protein contains an acidic N-terminal domain and a basic C-terminal domain separated by a proline-rich middle segment. Vinculin consists of a globular head domain that contains binding sites for talin and α-actinin as well as a tyrosine phosphorylation site, while the tail region contains binding sites for F-actin, paxillin, and lipids.

[0832] Consequently, any associations, combinations or compositions comprising a GFR-binding compound and a bioactive carrier as defined herein, which, when used to convert a neoplastic cell into a non-neoplastic cell and treat/prevent/diagnose a neoplastic disease, down-regulate the expression of paxillin and/or (preferably and) up-regulate the expression of vinculin in-vitro or in-vivo, shall be considered as being comprised within the scope of the present invention.

[0833] In one aspect, the present disclosure thus provides a pharmaceutical association, combination or (therapeutic, dermatologic, ophthalmologic, diagnostic, etc.) composition defined herein for use in a method of treating a neoplastic cell or a neoplastic disease by down-regulating the expression of paxillin and/or (preferably and) up-regulating the expression of vinculin in-vitro or in-vivo. Also provided is a method of treating a neoplastic cell or a neoplastic disease by down-regulating the expression of paxillin and/or (preferably and) up-regulating the expression of vinculin in-vitro or in-vivo, comprising administering to a subject in need thereof an effective amount of a pharmaceutical association, combination or (therapeutic, dermatologic, ophthalmologic, diagnostic, etc.) composition as defined herein.

[0834] Data have also shown (FIGS. 3 to 6) that the administration or action of the pharmaceutical association, combination or composition as defined herein on neoplastic cells to be treated, up-regulated (in particular, substantially increased) the expression of at least one differentiation genes and proteins such as ADIPOQ (ACRP30), FABP4 and/or PPARG for adipocytes; ACAN (AGC1), COL10A1, COMP, Sox9, IBSP (Sialoprotein II) and/or COL4 for chondrocytes; CDH5, KDR (VEGFR3) and/or PECAMI for the general endothelium; DLL4, EFNB2 and/or NRP1 for the arterial endothelium; LYVE1 and/or PROX1 for the lymphatic endothelium; NR2F2 and/or NRP2 for the venous endothelium; KRT1, KRT10 and/or KRT14 for the keratinocyte epithelium; PMEL (SILV), TYR and/or TYRP1 for the melanocyte epithelium; MMP-9, α-SMA and/or Vimentin for the fibrocyte; BGLAP, COL2A1, IBSP, RANK-L, OCN, DMP-1, Sclerostin and/or MEPE for Osteoblasts/Osteocytes; CALCR and/or CTSK for Osteoclasts; ITGB4 and/or KRT19 for cholangiocytes; ALB, G6PC and/or TAT for Hepatocytes; CD79A for early B-cell development; CD3E and/or PTCRA for early T-cell development; CCR5, CXCR4 and/or EMR1 for macrophages; ITGAM for the monocytes; GALC and/or GFAP for glial cells; MAP2, NEFH and/or TUBB3 for mature neurons; CHAT for cholinergic neurons; TH for dopaminergic neurons; GAD1 and/or SLC32A1 for GABA neurons; SLC17A6 and/or SLC17A7 for glutamatergic neurons; ISL1 for motor neurons; MBP for oligodendrocytes; POU4F2 for ganglion cells; RLBP1 for Muller cells; PDE6B and/or RCVRN for photoreceptor cells; NPHS2 for podocytes; AQP1, CYP27B1 and/or MIOX for proximal tubule cells; AQP2 for collecting duct cells; UMOD for distal tubule cells; SFTPB, SFTPC and/or SFTPD for lung cells; MYH6, MYH7 and/or NPPA for cardiomyocytes; CAV3, MYH1, MYOD1, GATA4 and/or MLC1 for skeletal muscle cells; MYH11, SMTN and/or TAGLN for smooth muscle cells; GCG, MAFB and/or POU3F4 for alpha cells; INS, MAFA and/or SLC2A2 for beta cells; SST for delta cells; GHRL (Ghrelin, Obestatin) for epsilon cells; PPY for pancreatic polypeptide producing (PP) cells; and/or CPA1 for exocrine cells.

[0835] Consequently, any associations, combinations or compositions comprising a GFR-binding compound and a bioactive carrier as defined herein, which, when used to convert a neoplastic cell into a non-neoplastic cell and treat/prevent/diagnose a neoplastic disease, up-regulate (in particular, substantially increase) the expression of at least one differentiation genes and proteins such as ADIPOQ (ACRP30), FABP4, PPARG, ACAN (AGC1), COL10A1, COMP, Sox9, IBSP (Sialoprotein II), COL4, CDH5, KDR (VEGFR3), PECAMI, DLL4, EFNB2, NRP1, LYVE1, PROX1, NR2F2, NRP2, KRT1, KRT10, KRT14, PMEL (SILV), TYR, TYRP1, MMP-9, α-SMA, Vimentin, BGLAP, COL2A1, IBSP, RANK-L, OCN, DMP-1, Sclerostin, MEPE, CALCR, CTSK, ITGB4, KRT19, ALB, G6PC, TAT, CD79A, CD3E, PTCRA, CCR5, CXCR4, EMR1, ITGAM, GALC, GFAP, MAP2, NEFH, TUBB3, CHAT, TH, GAD1, SLC32A1, SLC17A6, SLC17A7, ISL1, MBP, POU4F2, RLBP1, PDE6B, RCVRN, NPHS2, AQP1, CYP27B1, MIOX, AQP2, UMOD, SFTPB, SFTPC, SFTPD, MYH6, MYH7, NPPA, CAV3, MYH1, MYOD1, GATA4, MLC1, MYH11, SMTN, TAGLN, GCG, MAFB, POU3F4, INS, MAFA, SLC2A2, SST, GHRL (Ghrelin, Obestatin), PPY and/or CPA1, in-vitro or in-vivo, shall be considered as being comprised within the scope of the present invention.

[0836] In one aspect, the present disclosure thus provides a pharmaceutical association, combination or (therapeutic, dermatologic, ophthalmologic, diagnostic, etc.) composition defined herein for use in a method of treating a neoplastic cell or a neoplastic disease by up-regulating (in particular, substantially increasing) the expression of differentiation genes and proteins such as ADIPOQ (ACRP30), FABP4, PPARG, ACAN (AGC1), COL10A1, COMP, Sox9, IBSP (Sialoprotein II), COL4, CDH5, KDR (VEGFR3), PECAMI, DLL4, EFNB2, NRP1, LYVE1, PROX1, NR2F2, NRP2, KRT1, KRT10, KRT14, PMEL (SILV), TYR, TYRP1, MMP-9, α-SMA, Vimentin, BGLAP, COL2A1, IBSP, RANK-L, OCN, DMP-1, Sclerostin, MEPE, CALCR, CTSK, ITGB4, KRT19, ALB, G6PC, TAT, CD79A, CD3E, PTCRA, CCR5, CXCR4, EMR1, ITGAM, GALC, GFAP, MAP2, NEFH, TUBB3, CHAT, TH, GAD1, SLC32A1, SLC17A6, SLC17A7, ISL1, MBP, POU4F2, RLBP1, PDE6B, RCVRN, NPHS2, AQP1, CYP27B1, MIOX, AQP2, UMOD, SFTPB, SFTPC, SFTPD, MYH6, MYH7, NPPA, CAV3, MYH1, MYOD1, GATA4, MLC1, MYH11, SMTN, TAGLN, GCG, MAFB, POU3F4, INS, MAFA, SLC2A2, SST, GHRL (Ghrelin, Obestatin), PPY and/or CPA1, in-vitro or in-vivo. Also provided is a method of treating a neoplastic cell or a neoplastic disease by up-regulating (in particular, substantially increasing) the expression of differentiation genes and proteins such as ADIPOQ (ACRP30), FABP4, PPARG, ACAN (AGC1), COL10A1, COMP, Sox9, IBSP (Sialoprotein II), COL4, CDH5, KDR (VEGFR3), PECAMI, DLL4, EFNB2, NRP1, LYVE1, PROX1, NR2F2, NRP2, KRT1, KRT10, KRT14, PMEL (SILV), TYR, TYRP1, MMP-9, α-SMA, Vimentin, BGLAP, COL2A1, IBSP, RANK-L, OCN, DMP-1, Sclerostin, MEPE, CALCR, CTSK, ITGB4, KRT19, ALB, G6PC, TAT, CD79A, CD3E, PTCRA, CCR5, CXCR4, EMR1, ITGAM, GALC, GFAP, MAP2, NEFH, TUBB3, CHAT, TH, GAD1, SLC32A1, SLC17A6, SLC17A7, ISL1, MBP, POU4F2, RLBP1, PDE6B, RCVRN, NPHS2, AQP1, CYP27B1, MIOX, AQP2, UMOD, SFTPB, SFTPC, SFTPD, MYH6, MYH7, NPPA, CAV3, MYH1, MYOD1, GATA4, MLC1, MYH11, SMTN, TAGLN, GCG, MAFB, POU3F4, INS, MAFA, SLC2A2, SST, GHRL (Ghrelin, Obestatin), PPY and/or CPA1, in-vitro or in-vivo, comprising administering to a subject in need thereof an effective amount of a pharmaceutical association, combination or (therapeutic, dermatologic, ophthalmologic, diagnostic, etc.) composition as defined herein.

[0837] Data have also shown (FIG. 7) that the administration or action of the pharmaceutical association, combination or composition as defined herein on neoplastic cells to be treated increased the phosphorylation of the protein p53.

[0838] Data have also shown (FIG. 7) that the administration or action of the pharmaceutical association, combination or composition as defined herein on neoplastic cells to be treated down-regulated (in particular, substantially decreased or suppressed) the phosphorylation of the protein pRb.

[0839] Data have also shown (FIG. 8) that the administration or action of the pharmaceutical association, combination or composition as defined herein on neoplastic cells to be treated down-regulated the protein Src.

[0840] Tumor protein p53, also known as p53, cellular tumor antigen p53, phosphoprotein p53, or tumor suppressor p53, is a protein that in humans is encoded by the TP53 gene. The p53 protein is involved in multicellular organisms, where it regulates the cell cycle and, thus, functions as a tumor suppressor, generally preventing neoplastic diseases such as cancers. As such, p53 has been described as “the guardian of the genome” because of its role in conserving stability by preventing genome mutation. TP53 is thus said to be a tumor suppressor gene.

[0841] Src is a non-receptor protein tyrosine kinase that plays a multitude of roles in cell signalling. Src is involved in the control of many functions, including cell adhesion, growth, movement and differentiation. Src is widely expressed in many cell types, and can have different locations within a cell. It appears that the subcellular location of Src can affect its function. Src can associate with cellular membranes, such as the plasma membrane, the perinuclear membrane and the endosomal membrane. At the plasma membrane, Src can transduce signals from a variety of receptors to internal signalling pathways that convey these signals to the nucleus, cytoskeleton and other cellular components. For example, Src can act through growth factor receptors to affect cell growth and proliferation. Within the nucleus, Src is thought to help regulate the cell cycle and cell division by its interactions with other proteins. For example, Src can interact with Sam68 to help regulate gene expression. In bone osteoclasts, Src acts to regulate the respiratory enzyme cytochrome C oxidase (Cox), where Src-induced phosphorylation of Cox is required for maintaining high levels of ATP to meet the cells' high energy requirements. Src can also be found in the cytoplasm, and between cells at adherens junctions, where it takes on different roles.

[0842] pRb (Retinoblastoma protein) is a tumor suppressor protein that is dysfunctional in several major cancers. One function of pRb is to prevent excessive cell growth by inhibiting cell cycle progression until a cell is ready to divide. It is also a recruiter of several chromatin remodeling enzymes such as methylases and acetylases. Rb restricts the cell's ability to replicate DNA by preventing its progression from the G1 (first gap phase) to S (synthesis phase) phase of the cell cycle. Rb binds and inhibits transcription factors of the E2F family, which are composed of dimers of an E2F protein and a dimerization partner (DP) protein. When Rb is bound to E2F, the complex acts as a growth suppressor and prevents progression through the cell cycle. Rb is phosphorylated to pRb by certain Cyclin Dependent Kinases (CDKs). pRb is described as being hyperphosphorylated and when in this state, it is unable to complex E2F and therefore, unable to restrict progression from the G1 phase to the S phase of the cell cycle. During the M-to-G1 transition, pRb is progressively dephosphorylated by PP1, returning to its growth-suppressive hypophosphorylated state Rb.

[0843] Consequently, any associations, combinations or compositions comprising a GFR-binding compound and a bioactive carrier as defined herein, which, when used to convert a neoplastic cell into a non-neoplastic cell and treat/prevent/diagnose a neoplastic disease, down-regulate (in particular, substantially decrease or suppress) the expression of genes and proteins p53 and/or Src, in-vitro or in-vivo, shall be considered as being comprised within the scope of the present invention.

[0844] In one aspect, the present disclosure thus provides a pharmaceutical association, combination or (therapeutic, dermatologic, ophthalmologic, diagnostic, etc.) composition defined herein for use in a method of treating a neoplastic cell or a neoplastic disease by down-regulating (in particular, substantially decreasing or suppressing) the expression of genes and proteins p53 and/or Src. Also provided is a method of treating a neoplastic cell or a neoplastic disease by down-regulating (in particular, substantially decreasing or suppressing) the expression of genes and proteins p53 and/or Src, comprising administering to a subject in need thereof an effective amount of a pharmaceutical association, combination or (therapeutic, dermatologic, ophthalmologic, diagnostic, etc.) composition as defined herein.

[0845] In one aspect, the present disclosure provides a pharmaceutical association, combination or (therapeutic, dermatologic, ophthalmologic, diagnostic, etc.) composition defined herein for use in a method of treating a neoplastic cell or a neoplastic disease by:
[0846] down-regulating (in particular, substantially reducing) the expression of FAK genes and proteins and/or MAP kinase; and/or
[0847] reducing (in particular, substantially reducing) the expression or activity of GTPase Ras, Rho (Rho, Rac, Cdc42); and/or
[0848] down-regulating (in particular, reducing, significantly reducing or suppressing) the Ras/MAP kinase, FAK/Src kinase and/or PIP2 signalling pathways; and/or
[0849] substantially inhibiting the formation of at least one of, in particular a plurality of, the protein complexes comprising at least one cyclin D and at least one CDK4 or CDK6; and/or
[0850] substantially inhibiting, down-regulating or dampening the gene expression or formation of at least one of, in particular a plurality of, the cyclin D proteins; and/or
[0851] down-regulating the expression of paxillin and/or (preferably and) up-regulating the expression of vinculin; and/or
[0852] up-regulating (in particular, substantially increasing) the expression of at least one of differentiation genes and proteins such as ADIPOQ (ACRP30), FABP4, PPARG, ACAN (AGC1), COL10A1, COMP, Sox9, IBSP (Sialoprotein II), COL4, CDH5, KDR (VEGFR3), PECAMI, DLL4, EFNB2, NRP1, LYVE1, PROX1, NR2F2, NRP2, KRT1, KRT10, KRT14, PMEL (SILV), TYR, TYRP1, MMP-9, α-SMA, Vimentin, BGLAP, COL2A1, IBSP, RANK-L, OCN, DMP-1, Sclerostin, MEPE, CALCR, CTSK, ITGB4, KRT19, ALB, G6PC, TAT, CD79A, CD3E, PTCRA, CCR5, CXCR4, EMR1, ITGAM, GALC, GFAP, MAP2, NEFH, TUBB3, CHAT, TH, GAD1, SLC32A1, SLC17A6, SLC17A7, ISL1, MBP, POU4F2, RLBP1, PDE6B, RCVRN, NPHS2, AQP1, CYP27B1, MIOX, AQP2, UMOD, SFTPB, SFTPC, SFTPD, MYH6, MYH7, NPPA, CAV3, MYH1, MYOD1, GATA4, MLC1, MYH11, SMTN, TAGLN, GCG, MAFB, POU3F4, INS, MAFA, SLC2A2, SST, GHRL (Ghrelin, Obestatin), PPY and/or CPA1; and/or
[0853] increasing the phosphorylation of protein p53; and/or
[0854] down-regulating (in particular, substantially decreasing or suppressing) the phosphorylation of the protein pRb; and/or
[0855] down-regulating (in particular, substantially decreasing or suppressing) the gene and protein expression of Src; and/or
[0856] not inducing the death of said neoplastic cell; and/or
[0857] dampening or arresting cell division or cell proliferation of said neoplastic cell.

[0858] In one example, the pharmaceutical association as defined herein may thus be an animal or mammal (preferably a human) anti-neoplastic disease agent (e.g. anti-cancer agent) which has demonstrated the ability to convert a neoplastic cell into a non-neoplastic cell in vitro, ex-vivo and/or in vivo and/or to protect a subject from a neoplastic disease, disorder, condition, pathology or any symptoms thereof.

[0859] In one aspect, the present disclosure also provides methods of converting a neoplastic cell into a non-neoplastic cell, said method comprising the administration to a cell, in-vitro, ex-vivo or in-vivo, of an effective amount of a pharmaceutical association, combination or composition as defined herein. In one example, said methods induce the differentiation of said neoplastic cell. In one example, said conversion is effected in less than 7 days, in less than 6 days, 5 days, 4 days, 3 days, 2 days, 24 hours or 18 hours, in particular in less than 24 hours. In other examples:
[0860] said neoplastic cell is a non-terminally differentiated cell and said methods comprise the differentiation of said non-terminally differentiated; and/or
[0861] said methods comprise the conversion and/or recoding of a neoplastic cell to induce and/or promote and/or improve self-healing and/or self-recovery thereof; and/or
[0862] said methods comprise restoring the ability of a neoplastic cell to undergo differentiation; and/or
[0863] said methods comprise converting and/or recoding a circulating or non-circulating neoplastic cell such as a metastatic or non-metastatic cancer cell, into a non-neoplastic cell; and/or
[0864] said methods comprise providing and/or producing and/or inducing the formation of a physiologically functional and/or healthy cell of the bone, chondrocyte, vascular, fibroblast, renal, retinal, neuronal, ligament, tendon, reproduction system, lung, blood, adipocyte cell lineage from a neoplastic cell; and/or
[0865] said methods comprise inducing and/or promoting and/or enhancing neoplastic cell differentiation; and/or
[0866] said methods comprise non-mutagenically protecting a subject from a neoplastic disease i.e. without modifying or altering the genome of the treated neoplastic cells; and/or
[0867] said methods comprise the extracellular treatment of a neoplastic disease, disorder, condition, pathology, or any symptoms thereof; and/or
[0868] said methods comprise down-regulating (in particular, substantially reducing) the expression of FAK genes and proteins and/or MAP kinase and/or reducing (in particular, substantially reducing) the expression or activity of GTPase Ras, Rho (Rho, Rac, Cdc42) in-vitro or in-vivo; and/or
[0869] said methods comprise restoring the cell adhesion checkpoint of said neoplastic cell; and/or
[0870] said methods comprise substantially inhibiting, down-regulating or dampening the gene expression or formation of at least one of, in particular a plurality of, the cyclin D proteins; and/or
[0871] said methods comprise substantially inhibiting the formation of at least one of, in particular a plurality of, the protein complexes comprising at least one cyclin D and at least one CDK4 or CDK6; and/or
[0872] said methods comprise not inducing the death of said neoplastic cell; and/or
[0873] said methods comprise dampening or arresting cell division and/or cell proliferation of said neoplastic cell; and/or
[0874] said methods comprise activating and/or promoting anti-mitogen activity and/or tumor suppressor pathways and/or anti-oncogenic activity in said neoplastic cell; and/or
[0875] said methods comprise down-regulating the gene expression of paxillin and/or (preferably and) up-regulating the gene expression or increasing turn-over of vinculin in-vitro or in-vivo; and/or
[0876] said methods comprise up-regulating (in particular, substantially increasing) the expression of differentiation genes and proteins such as ADIPOQ (ACRP30), FABP4, PPARG, ACAN (AGC1), COL10A1, COMP, Sox9, IBSP (Sialoprotein II), COL4, CDH5, KDR (VEGFR3), PECAMI, DLL4, EFNB2, NRP1, LYVE1, PROX1, NR2F2, NRP2, KRT1, KRT10, KRT14, PMEL (SILV), TYR, TYRP1, MMP-9, α-SMA, Vimentin, BGLAP, COL2A1, IBSP, RANK-L, OCN, DMP-1, Sclerostin, MEPE, CALCR, CTSK, ITGB4, KRT19, ALB, G6PC, TAT, CD79A, CD3E, PTCRA, CCR5, CXCR4, EMR1, ITGAM, GALC, GFAP, MAP2, NEFH, TUBB3, CHAT, TH, GAD1, SLC32A1, SLC17A6, SLC17A7, ISL1, MBP, POU4F2, RLBP1, PDE6B, RCVRN, NPHS2, AQP1, CYP27B1, MIOX, AQP2, UMOD, SFTPB, SFTPC, SFTPD, MYH6, MYH7, NPPA, CAV3, MYH1, MYOD1, GATA4, MLC1, MYH11, SMTN, TAGLN, GCG, MAFB, POU3F4, INS, MAFA, SLC2A2, SST, GHRL (Ghrelin, Obestatin), PPY and/or CPA1, in-vitro or in-vivo; and/or
[0877] said methods comprise down-regulating (in particular, substantially decreasing or suppressing) the gene expression of proteins p53, pRb and/or Src.

[0878] In one example, the pharmaceutical association as defined herein may thus be an animal or mammal (preferably a human) anti-neoplastic disease agent (e.g. anti-cancer agent) which has demonstrated the ability to convert a neoplastic cell into a non-neoplastic cell in vitro, ex-vivo and/or in vivo and/or to protect a subject from a neoplastic disease, disorder, condition, pathology or any symptoms thereof.

[0879] In one example, said administration induces the quiescence of the neoplastic cell. In one example, said administration prevents, reduces or suppresses the cell division and/or cell proliferation of said neoplastic cell. In one example, said administration regulates or promotes anti-mitogen activity and/or tumor suppressor activity and/or anti-oncogenic activity in said neoplastic cell. In one example, said method is cytostatic for the treated cell. In one example, said method is not cytotoxic for the treated cell. In one example, said method is non-mutagenic.

[0880] In one aspect, the present disclosure provides a method of producing a physiologically functional and healthy cell, comprising the administration in-vitro, ex-vivo or in-vivo to a neoplastic cell an effective amount of a pharmaceutical association or composition as defined herein and wherein said physiologically functional and healthy cell is selected from the group consisting of an osteoblast, osteocyte, chondroblast, chondrocyte, neuroblast, neurocyte, Sertoli cells, Leydig cell, Germ cell, Myoblast, Myocyte, keratinocyte, endothelial cells, angioblast, fibroblast, fibrocyte, podocyte.

[0881] In one aspect, the present disclosure provides a method of converting a cell “X” into a cell “Y”, said method comprising the administration to a neoplastic cell of an effective amount of a pharmaceutical association, combination or composition as defined herein, wherein cell X is a neoplastic cell selected from the group consisting of:
[0882] a. a metastatic or non-metastatic neoplastic cell;
[0883] b. a cell comprising at least one alteration, mutation and/or deregulation of at least one tumour suppressor gene or of at least one of their gene-encoded product (such as for example the Rb and/or P53 genes or gene products);
[0884] c. a cell comprising at least one alteration, mutation and/or deregulation of at least one of proto-oncogene or of at least one of their gene-encoded product (such as for example Src-tyrosine kinase- and/or Ras-small GTPase);
[0885] d. a cell having an impaired DNA repair mechanism (such as for example BRCA1 and BRCA2);
[0886] e. a cell comprising at least one alteration, mutation and/or deregulation of at least one mitogen and/or anti-mitogen gene or at least one of their gene-encoded products (such as for example TGF-beta);
[0887] f. a cell having an defective, altered or impaired cell cycle or cell cycle control, wherein said defective cell cycle is due to either at least one alteration, mutation and/or deregulation of at least one cell cycle gene or gene-encoded product (for example Cyclin E1, Cyclin D1, CDK 4/6) at least one alteration, mutation and/or deregulation of at least one cell cycle checkpoint or diminution or reduction of a checkpoint sensibility and/or responsiveness;
[0888] g. a stem cell-like cell comprising a Stro-1 positive marker and having multi-potency;
[0889] h. a cell comprising at least one specific differentiation marker such as ADIPOQ (ACRP30), FABP4, PPARG, ACAN (AGC1), COL10A1, COMP, Sox9, IBSP (Sialoprotein II), COL4, CDH5, KDR (VEGFR3), PECAMI, DLL4, EFNB2, NRP1, LYVE1, PROX1, NR2F2, NRP2, KRT1, KRT10, KRT14, PMEL (SILV), TYR, TYRP1, MMP-9, α-SMA, Vimentin, BGLAP, COL2A1, IBSP, RANK-L, OCN, DMP-1, Sclerostin, MEPE, CALCR, CTSK, ITGB4, KRT19, ALB, G6PC, TAT, CD79A, CD3E, PTCRA, CCR5, CXCR4, EMR1, ITGAM, GALC, GFAP, MAP2, NEFH, TUBB3, CHAT, TH, GAD1, SLC32A1, SLC17A6, SLC17A7, ISL1, MBP, POU4F2, RLBP1, PDE6B, RCVRN, NPHS2, AQP1, CYP27B1, MIOX, AQP2, UMOD, SFTPB, SFTPC, SFTPD, MYH6, MYH7, NPPA, CAV3, MYH1, MYOD1, GATA4, MLC1, MYH11, SMTN, TAGLN, GCG, MAFB, POU3F4, INS, MAFA, SLC2A2, SST, GHRL (Ghrelin, Obestatin), PPY and/or CPA1;
[0890] i. a cell having increased cytoplasmic and nuclear stiffness;
[0891] j. a cell having high cytoskeleton dynamics; and
[0892] k. any combination thereof;
   and wherein cell Y is a non-neoplastic cell selected from the group consisting of:
[0893] a. a cell in a terminal differentiation state;
[0894] b. a cell in a non-terminal differentiation state and more differentiated than the X cell;
[0895] c. a cell having a physiologically normal proliferation;
[0896] d. a physiologically functional cell having healthy or normal genes expression and proteins activity.

[0897] In one aspect, the present disclosure provides methods to activate a growth factor receptor present on the surface of a neoplastic cell, said method comprising administering to said neoplastic cell an effective amount of a pharmaceutical association, combination or composition as defined herein, wherein administering said pharmaceutical association, combination or composition activates the growth factor receptor present on the surface of the neoplastic cell.

[0898] In one aspect, the present disclosure provides methods of delivering a pharmaceutical composition in-vitro, ex-vivo or in-vivo to a neoplastic cell, comprising the contacting of said neoplastic cell with said pharmaceutical composition, and wherein said pharmaceutical composition comprises a GFR-binding compound and a bioactive carrier as defined herein.

[0899] In one aspect, the present disclosure provides methods of administering a pharmaceutical association, combination or composition comprising a GFR-binding compound and a bioactive carrier to a subject comprising the contacting of at least one body part of said subject with said pharmaceutical association, combination or composition.

[0900] Protected from a disease, condition, disorder or pathology refers to the treatment of the underlying cause of the disease, condition, disorder or pathology as well as reducing the symptoms of the disease, condition, disorder or pathology; and/or reducing the occurrence of the disease, condition, disorder or pathology; and/or reducing the severity of the disease, condition, disorder or pathology. Protecting a patient can refer to the ability of a therapeutic composition of the present invention, when administered to a patient, to prevent a disease, condition, disorder or pathology from occurring and/or to cure or to alleviate disease, condition, disorder or pathology symptoms, signs or causes. As such, to protect a patient from a disease, condition, disorder or pathology includes both preventing disease, condition, disorder or pathology occurrence (prophylactic treatment) and treating a patient that has a disease, condition, disorder or pathology or that is experiencing initial symptoms or later stage symptoms of a disease, condition, disorder or pathology (therapeutic treatment).

[0901] Treating: As used herein, unless indicated otherwise or contradictory in context, the term “treating” or “treatment” refers to partially or completely alleviating, ameliorating, improving, relieving, delaying onset of, inhibiting progression of, reducing severity of, and/or reducing incidence of one or more symptoms or features of a particular disease, disorder, pathology and/or condition. For example, in certain embodiments, “treating” or “treatment of” cancer may refer to inhibiting survival, growth, and/or spread of a tumor.

[0902] Treatment may be administered to a subject who does not exhibit signs of a disease, disorder, and/or condition and/or to a subject who exhibits only early signs of a disease, disorder, pathology and/or condition for the purpose of decreasing the risk of developing pathology associated with the disease, disorder, and/or condition.

[0903] As used herein, “treating a neoplastic cell” is used interchangeably with the expression “converting a neoplastic cell into a non-neoplastic cell”.

[0904] Preventing: As used herein, unless indicated otherwise or contradictory in context, the term “preventing” refers to partially or completely delaying onset of an infection, disease, disorder and/or condition; partially or completely delaying onset of one or more symptoms, features, or clinical manifestations of a particular infection, disease, disorder, and/or condition; partially or completely delaying onset of one or more symptoms, features, or manifestations of a particular infection, disease, disorder, and/or condition; partially or completely delaying progression from an infection, a particular disease, disorder and/or condition; and/or decreasing the risk of developing pathology associated with the infection, the disease, disorder, and/or condition.

[0905] Substantially diminished, reduced or inhibited: As used herein, unless indicated otherwise or contradictory in context, the term “substantially diminished” or “substantially inhibited” as it relates to cellular activity and/or function, protein expression or complexes formation, refers to a diminution or reduction in activity or function, in comparison with the activity and/or function of a normal or healthy cell (e.g. a non-neoplastic cell), of 1%, 2%, 3%, 4%, 5%, 6%, 7%, 8%, 9%, 10%, 11%, 12%, 13%, 14%, 15%, 16%, 17%, 18%, 19%, 20%, 21%, 22%, 23%, 24%, 25%, 26%, 27%, 28%, 29%, 30%, 31%, 32%, 33%, 34%, 35%, 36%, 37%, 38%, 39%, 40%, 41%, 42%, 43%, 44%, 45%, 46%, 47%, 48%, 49%, 50%, 51%, 52%, 53%, 54%, 55%, 56%, 57%, 58%, 59%, 60%, 61%, 62%, 63%, 64%, 65%, 66%, 67%, 68%, 69%, 70%, 71%, 72%, 73%, 74%, 75%, 76%, 77%, 78%, 79%, 80%, 81%, 82%, 83%, 84%, 85%, 86%, 87%, 88%, 89%, 90%, 91%, 92%, 93%, 94%, 95%, 96%, 97%, 98%, or 99%, in particular of 50% to 99%, 55% to 99%, 60% to 99%, 65% to 99%, 70% to 99%, 75% to 99%, 80% to 99%, 85% to 99% or 90% to 99%. The same applies conversely to the term “substantially increased”.

[0906] Disease: As used herein, unless indicated otherwise or contradictory in context, the term “disease” refers to any deviation from the normal health of a patient and includes a state when disease symptoms are present, as well as conditions in which a deviation has occurred, but symptoms are not yet manifested. A defective, ill-functioning, malfunctioning, dysfunctioning, and/or deleterious cell, such as e.g. a neoplastic cell, may be a cause of a disease. The same applies to “condition”, “disorder” and “pathology”.

[0907] Neoplasm: As used herein, unless indicated otherwise or contradictory in context, the term “neoplasm” (sometimes also referred to as tumor or tumour) refers to an abnormal growth of tissue. This abnormal growth usually but not always forms a mass. The World Health Organization classifies neoplasms into four main groups: benign neoplasms, in situ neoplasms, malignant neoplasms, and neoplasms of uncertain or unknown behavior. A malignant neoplasm is a cancer.

[0908] Neoplastic cell: As used herein, unless indicated otherwise or contradictory in context, the term “neoplastic cell” refers to a cell with abnormal proliferation, generally due the presence of a defective cell cycle, as well as cells which may become neoplastic such as cancer stem cell for which a definition is given in “Refining the role for adult stem cells as cancer cells of origin”, White A C, Lowry W E, Trends Cell Biol. 2014 Sep. 18. pii: S0962-8924(14)00145-7, and “review article Stem cells, cancer, and cancer stem cells”, Tannishtha Reya et al., Nature 414, 105-111 (1 Nov. 2001), which are incorporated herein by reference in their entirety.

[0909] Neoplastic disease: As used herein, unless indicated otherwise or contradictory in context, the term “neoplastic disease”, used interchangeably with “neoplastic conditions”, “neoplastic disorder” and “neoplastic pathology”, refers to a disease associated with an abnormal growth of tissue, generally due to the presence of a neoplastic cell.

[0910] Circulating: As used herein, unless indicated otherwise or contradictory in context, the term “circulating”, when used in relation to a neoplastic cell, refers to a neoplastic cell that has detached itself from a primary tumor site and migrates to a different location in the body to become a metastatic tumor.

[0911] Cancers: As used herein, unless indicated otherwise or contradictory in context, the term “cancer” refers to a malign form of neoplasm which includes sarcomas, carcinomas, lymphomas, leukemias (or leukaemias), teratomas, mesotheliomas, myelomas and germinomas. Cancers include, but are not limited to, Acute lymphoblastic leukaemia (ALL), Acute myeloid leukaemia, Adrenocortical carcinoma, AIDS-related cancers, AIDS-related lymphoma, Anal cancer, Appendix cancer, Astrocytoma, childhood cerebellar or cerebral, Basal-cell carcinoma, Bile duct cancer, Bladder cancer, Bone tumor, osteosarcoma/malignant fibrous histiocytoma, Brainstem glioma, Brain cancer, Breast cancer, Bronchial adenomas/carcinoids, Burkitt's lymphoma, Carcinoid tumor, Central nervous system lymphoma, Cerebellar astrocytoma, Cerebral astrocytoma/malignant glioma, Cervical cancer, Childhood cancers, Chronic bronchitis, Chronic lymphocytic leukaemia, Chronic myelogenous leukaemia, Chronic myeloproliferative disorders, Chronic obstructive pulmonary disease (COPD), Colon cancer, Cutaneous T-cell lymphoma, Desmoplastic small round cell tumor, Emphysema, Endometrial cancer, Ependymoma, Esophageal cancer, Ewing's sarcoma in the Ewing family of tumors, Extracranial germ cell tumor, Extragonadal germ cell tumor, Extrahepatic bile duct cancer, Eye cancer, Gallbladder cancer, Gastric (stomach) cancer, Gastrointestinal carcinoid tumor, Gastrointestinal stromal tumor (GIST), Germ cell tumor: extracranial, extragonadal, or ovarian, Gestational trophoblastic tumor, Glioma of the brain stem, Glioma, Gastric carcinoid, Hairy cell leukemia, Head and neck cancer, Heart cancer, Hepatocellular (liver) cancer, Hodgkin lymphoma, Hypopharyngeal cancer, Hypothalamic and visual pathway glioma, childhood, Intraocular melanoma, Islet cell carcinoma (endocrine pancreas), Kaposi sarcoma, Kidney cancer (renal cell cancer), Laryngeal cancer, Leukemias, acute lymphoblastic leukemia, acute myeloid leukemia, chronic lymphocytic leukemia, chronic myelogenous leukemia, hairy cell Leukemia, Lip and oral cavity cancer, Liposarcoma, Liver cancer, Lung cancer, AIDS-related lymphoma, Burkitt lymphoma, cutaneous T-Cell lymphoma, Hodgkin lymphoma, Non-Hodgkin lymphoma, primary central nervous system lymphoma, Macroglobulinemia, Male breast cancer, Malignant fibrous histiocytoma of bone/osteosarcoma, Medulloblastoma, intraocular (eye) Melanoma, Merkel cell cancer, Mesothelioma, Metastatic squamous neck cancer with occult primary, Mouth cancer, Multiple endocrine neoplasia syndrome, Multiple myeloma/plasma cell neoplasm, Mycosis fungoides, Myelodysplastic syndromes, Myelodysplastic/myeloproliferative diseases, multiple Myeloma, Myeloproliferative disorders, Nasal cavity and paranasal sinus cancer, Nasopharyngeal carcinoma, Neuroblastoma, Oral cancer, Oropharyngeal cancer, Osteosarcoma/malignant fibrous histiocytoma of bone, Ovarian cancer, Ovarian epithelial cancer, Ovarian germ cell tumor, Ovarian low malignant potential tumor, Pancreatic cancer, Pancreatic cancer, islet cell Paranasal sinus and nasal cavity cancer, Parathyroid cancer, Penile cancer, Pharyngeal cancer, Pheochromocytoma, Pineal astrocytoma, Pineal germinoma, Pineoblastoma and supratentorial primitive neuroectodermal tumors, Pituitary adenoma, Plasma cell neoplasia/Multiple myeloma, Pleuropulmonary blastoma, Primary central nervous system lymphoma, Prostate cancer, Rectal cancer, Renal cell carcinoma (kidney cancer), Renal pelvis and ureter, transitional cell cancer, Retinoblastoma, Rhabdomyosarcoma, Salivary gland cancer, Ewing family of tumors Sarcoma, Kaposi Sarcoma, soft tissue Sarcoma, uterine Sarcoma, Sézary syndrome, Skin cancer (non-melanoma), Skin cancer (melanoma), Merkel cell Skin carcinoma, Small intestine cancer, Soft tissue sarcoma, metastatic squamous neck cancer with occult primary, Stomach cancer, Supratentorial primitive neuroectodermal tumor, cutaneous T-Cell lymphoma, Testicular cancer, Throat cancer, Thymoma and thymic carcinoma, Thyroid cancer, Transitional cell cancer of the renal pelvis and ureter, Trophoblastic tumor, transitional cell cancer, Urethral cancer, Uterine cancer, Uterine sarcoma, Vaginal cancer, Visual pathway and hypothalamic glioma, Vulvar cancer, Waldenström macroglobulinemia, and Wilms tumor (kidney cancer). In certain embodiments, cancers that may be treated using the recoding therapy disclosed herein are selected from the group consisting of sarcomas such as Osteosarcoma, Osteoma, Chondrosarcoma, Chondroma, Leiomyosarcoma, Leiomyoma, Rhabdomyosarcoma, Rhabdomyoma, Mesothelioma, Fibrosarcoma, Fibroma, Malignant Histiocytoma, Hisitocytoma, Angiosarcoma, Hemangiosarcoma, Hemangioma, Hemangiopericytoma, Lymphangiosarcoma, Lymphangioma, Liposarcoma, Lipid Cell Tumor, Lipoma, Myxosarcoma, Chordoma, Cystosarcoma Phylloides, Fibroadenoma, Seminoma, Dysgerminoma, Sertoli-Leydig Cell Tumor, Arrhenoblastoma, Granulose-Theca Cell Tumor, Hilar Cell Tumor, Prostate Cancer, Prostatic Hypertrophy, Wilms Tumor, Melanoma, Nevus, Neurofibrosarcoma, Glioma, Anaplastic Glioma, Glioblastoma, Neuroblastoma, Medulloblastoma, Ganglioneuroma, Malignant meningioma, Meningioma, Malignant Schwannoma, Schwannoma, Neurilemmoma, Neurofibroma and Mesenchymous Tumor; Carcinomas such as Squamous Cell Carcinoma, Merkel Cell Neoplasm, Epidermoid Carcinoma, malignant Skin Adnexal Tumor, Adenocarcinoma, Hepatocellular Carcinoma, Renal Cell Carcinoma, Choriocarcinoma, Hypernephroma, Cholangiocarcinoma, Transitional Cell Carcinoma, Seminoma, Embryonal Cell Carcinoma, Papilloma, Seborrheic Keratosis, Skin Adnexal Tumors, Hepatoma, Adenoma, Hepatic Adenoma, Renal Tubular Adenoma, Bile Duct Adenoma, Transitional Cell Papilloma, Hydatidiform Mole, Parathyroid Carcinoma, Parathyroid Adenoma, Medullary Carcinoma of Thyroid, C Cell Hyperplasia, Malignant Pheochromocytoma, Pheochromocytoma, Islet Cell Carcinoma, Islet Cell Adenoma, Insulinoma, Gastrinoma, Malignant Carcinoid, Carcinoid, Malignant Paraganglioma, Chemodectoma and Paraganglioma; Myelomas; Leukemias such as Myelogenous Leukemia, Lymphatic Leukemia, Policythemia, Aleukemic Leukemia, Preleukemia and Myeloproliferative Disorders; Lymphoma such as Myeloma, Hodgkin Lymphoma, Non-Hodgkin Lymphoma, Plasmacytoma and Plasmacytosis; Adenosquamous Carcinoma, Mesodermal Tumor, Carcinosarcoma and Teratocarcinoma.

[0912] Symptoms of neoplastic diseases: In one example, the present invention treats or alleviates at least one symptom selected from Angina, Bradypnea, Breathing difficulties, Gradual vision change in both eyes, Gradual vision changes in one eye, Head symptoms, Heartburn, Muscle symptoms, Nerve symptoms, Perforated gastric ulcer, Perforated ulcer, Respirations, shallow, Sexual symptoms, Weight loss, Oesophagus symptoms, Weight symptoms, Anaemia, Bad breath, Breath odors, Burning feet, Burning Legs, Cleft lip with or without cleft palate in children, Communication symptoms, Diarrhea, Dyspepsia, Easily fatigued, Enlarged liver, Face symptoms, Foot pain, Gastritis, Gastrooesophageal reflux in pregnancy, Glossitis, Hairy Tongue, Hyperlipidaemia, Hypertriglyceridemia, Impotence, Lack of energy, Lag in breathing, Male infertility, Meniere's disease, Movement symptoms, Musculoskeletal symptoms, Night sweats in children, Non-respiratory causes of shallow respiration, Raised ambulatory 24 hr pH monitoring, Rapid heartbeat, Respiratory lag, Sleep symptoms, Sleeplessness, Speech symptoms, Sweat symptoms, Trauma-related symptoms, Voice symptoms, Vomiting, White tongue, Abdominal symptoms, Abnormal blood test symptoms, Acute reflux-like regurgitation in pregnancy, Acute reflux-like symptoms in pregnancy, Acute reflux-like vomiting in pregnancy, Acute stomach ulcer-like symptoms in pregnancy, Birth symptoms, Blanching in the fingers, Bleeding symptoms, Blood symptoms, Blood vessel damage, Chronic pain in multiple muscles, Digestive symptoms, Elevated blood pressure in pregnancy, Episodic arterial vasospasm, Female infertility, Female reproductive symptoms, Fertility symptoms, Heart enlargement, Hiatus hernia, Hiatus hernia related to chronic digestive disorders, High blood pressure, Hypertension-like symptoms in pregnancy, Impaired myocardial contractility, Increased Systolic pressure, Infection, Infertility, Intermittent claudication, Intermittent claudication of both lower limbs, Intermittent claudication of one lower limb, Intermittent pain of the lower limb, Lower abdominal symptoms, Lower blood pressure in the legs than in the arms, Mouth symptoms, Mycocardial ischemia, Noncompliance, Occlusion of renal arteries, Pain, Peripheral arterial trauma, Poor appetite, Poor wound healing, Pregnancy symptoms, Pulsatile Abdominal swelling, Red blood cell symptoms, Reflux-like symptoms, Respiratory symptoms, Sensory symptoms, Severe chronic pain in multiple bones, Sore throat, Sweating, Throat symptoms, Urinary incontinence, Venous insufficiency, Women's health symptoms, Birth defects, Eating symptoms, 1 litre of sweat per hour, Aberrant behaviour in pregnancy, Abnormal eye movements, Abnormal Liver Function Tests in Pregnancy, Abnormal thinking in pregnancy, Absenteeism, Accentuated fall in systolic pressure, Acidosis, Action tremor, Acute epilepsy-like symptoms, Acute forgetfulness in pregnancy, Acute hemorrhagic pancreatitis, Acute intermittent forgetfulness in pregnancy, Acute onset of daytime sleepiness, Acute onset of daytime sleepiness in adults, Acute onset of daytime sleepiness in the elderly, Acute pancreatitis, Addiction symptoms, Aggression, Alcohol abuse, Alcohol breath odor, Alcohol use, Altered bladder habits in pregnancy, Altered mental state, Altered vital signs, Anxiety disorder in pregnancy, Anxiety in pregnancy, Apprehension in pregnancy, Arrhythmia, Arrhythmias, Atrial fibrillation, Balance symptoms, Behavior problems at school, Behavior problems at work, Behavior problems in adults, Behavior problems in children, Behavior problems in teens, Behavioral symptoms, Behaviour changes in pregnancy, Blackouts, Cerebellar ataxia, Chronic Diarrhea, Chronic orthostatic hypotension, Cleft palate in children, Clumsiness, CNS depression in children, Cognitive impairment, Coma, Confusion, Confusion in children, Coordination problems, De-personalization, Decreased level of consciousness, Deep stupor, Dehydration, Delayed ejaculation, Delirium, Delusions, Dementia, Depressed mental status, Depressive symptoms, Diabetic retinopathy, Diaphoresis of the feet, Diaphoresis of the forehead, Diaphoresis of the palms, Diaphoresis of the soles, Difficulty concentrating in adults, Disoriented state, Diuresis, Dramatic fall in blood pressure, Drowsiness, Drug abuse, Drug withdrawal causing new-onset seizures, Drugs, Drugs causing diarrhea, Drugs causing macrocytosis, Drugs causing persistent hypoglycemia, Drugs causing persistent hypoglycemia in adolescents, Drugs causing persistent hypoglycemia in children, Drugs causing persistent hypoglycemia in infants, Dysphagia due to esophagitis, Emotional symptoms, Energy symptoms, Epilepsy-like symptoms, Episodic Diaphoresis, Episodic Diaphoresis as in case of diabetes mellitus, Euphoria, Excessive diaphoresis, Eye symptoms, Fainting, Fainting episodes similar as in pulmonary hypertension, Falls, Fatigue, Feeling the heartbeat, Flushing, Forgetfulness, Forgetfulness in pregnancy, Frequency of urination in pregnancy, Frequent urination, Frequent urination in pregnancy, Generalised diaphoresis, Generalised diaphoresis with heat loss via evaporation, Hallucinations, Headache, Heart arrhythmia, Heart arrhythmias, Heart flutters, High ALP, High ALT, High AST, Hyperosmolarity, Hypoperfusion state, Hypothermia, Hypothermic attack, Imbalance, Impaired circulation, Inadequate intravascular pressure, Inattention, Inattention symptoms, Increased bilirubin, Increased GGT, Increased prothrombin time, Increased sweating, Intercourse symptoms, Intermittent diaphoresis, Intermittent epilepsy-like symptoms, Intermittent seizures in early childhood, Involuntary tonic movements, Irregular heartbeat, Irritability, Jaundice in pregnancy, Level of consciousness symptoms, Liver tenderness in pregnancy, Low albumin, Low blood platelet level in pregnancy, Low blood pressure, Low blood sugar, Low temperature, Major depression in pregnancy, Male impotence, Memory disturbances, Memory Disturbances in pregnancy, Memory loss in pregnancy, Memory symptoms, Memory symptoms in pregnancy, Mental changes in pregnancy, Mental depression, Mental depression in pregnancy, Mental problems, Mental problems in pregnancy, Mild depression in pregnancy, Mild depression-like symptoms in pregnancy, Mild personality changes, Moderate depression in pregnancy, Mood swings, Muscle pain, Muscle weakness, Myoclonus, Nerve damage, Nervousness, Nervousness in pregnancy, Neuromuscular irritability, Neuromuscular irritability of lower limbs, Neuropathy, Night time urination in pregnancy, Night urination in pregnancy, Nocturia in pregnancy, Numbness in Both Feet, Numbness in one foot, Nystagmus, Ocular myokymia, Orthostatic hypotension, Ototoxic medications, Palpitations, Pancreatitis, Paresthesias, Penile Burning Sensation, Persistent painful erection, Personality change, Personality symptoms, Phobia, Progressive mental deterioration, Prolonged exposure to cold, Psychiatric symptom, Pulse irregularity in pregnancy, Red face, Reduced immune response, Reduced intravascular pressure, Reduced sperm count, Retinopathy, School problems, Seizures, Seizures in infants and early childhood, Self-esteem symptoms, Severe epilepsy-like symptoms, Sexual dysfunction in pregnancy, Short-term memory loss, Signs of circulatory collapse, Signs of circulatory collapse as seen in intestinal hemorrhage, Sleeping problems, Slurred speech, Social problems, Society problems, Sole numbness, Standing symptoms, Stupor, Subfertility, Substance abuse causing school underachievement and academic failure, Substances of abuse causing delirium, Sudden onset of confusion in children, Syncopal episode, Thigh Burning Sensation, Thrombocytopenia, Thrombocytopenia in pregnancy, Tingling in Both Feet, Tingling in both hands, Tingling in one foot, Tingling in one hand, Tonic-clonic seizure, Toxins causing vomiting, Tremor, Unusual body odor in children, Urinary burning, Urinary urgency, Urine retention, Vascular collapse, Vertigo, Violent behaviour, Walking symptoms, Weight loss in pregnancy, Abnormal uterine bleeding, Abortion, Abruptio Placentae in Pregnancy, Abscessed teeth, Acid Reflux in pregnancy, Acquired mental retardation, Acute acid reflux into mouth during pregnancy, Acute attack of asthma, Acute cerebral infarct, Acute seasonal asthma-like symptoms, Aphthous Ulcer, Arm burning sensation, Arm coldness, Arm infection, Arm inflammation, Arm numbness, Arm paresthesia, Arm redness, Arm sensitive, Arm spasm, Arm swelling, Atelectasis, Biceps burning sensation, Biceps cold, Biceps infection, Biceps inflammation, Biceps numb, Biceps redness, Biceps spasm, Biceps swelling, Biceps tingling, Bilateral cleft lip and palate, Bilateral complete cleft lip, Bilateral stroke, Black hairy tongue, Bladder symptoms, Blood clots, Blood lead concentration, Blood pressure symptoms, Blood vessel symptoms, Blue lips, Bone changes, Breath sound symptoms, Breath symptoms, Bronchial cancer, Bronchitis, Brown nails, Cancer-related symptoms, Cardiovascular symptoms, Cervix symptoms, Chronic bronchitis, Chronic cough, Chronic cough in adolescents, Circulation symptoms, Claudication, Cluster headache, Constant leg pain, Coracobrachialis infection, Coracobrachialis redness, Coracobrachialis swelling, Cough, Cramping leg pain, Cramping pain in both legs, Dark spots on teeth, Darkened tongue, Death, Death-related symptoms, Decreased salivary function, Digit burning sensation, Digit cold, Digit infection, Digit inflammation, Digit numb, Digit redness, Digit sensitive, Digit spasm, Digit swelling, Digit tingling, Disc herniation, Disc prolapse, Discolored teeth in children, Dry cough, Dry Gangrene, Dry mucous membrane as in case of Sjogren's syndrome, Dry skin, Electrocardiogram changes, Eructation, Exercise symptoms, Female genital symptoms, Female sexual symptoms, Femur burning sensation, Femur numb, Femur tingling, Fetal symptoms, Fibula burning sensation, Fibula numb, Fibula tingling, Finger burning sensation, Finger pulp burning sensation, Fingernail burning sensation, Fingers burning sensation, Fingers cold, Fingers infection, Fingers inflammation, Fingers numb, Fingers redness, Fingers sensitive, Fingers spasm, Fingers swelling, Fingers tingling, Forearm burning sensation, Forearm cold, Forearm infection, Forearm inflammation, Forearm numb, Forearm redness, Forearm sensitive, Forearm spasm, Forearm swelling, Forearm tingling, Foul mouth odour, Genital symptoms, Growth symptoms, Heart damage, Heart disease, Heart rhythm symptoms, Heart symptoms, Heartburn after eating in pregnancy, Heartburn after exercise in pregnancy, Heartburn in pregnancy, Heartburn pain resistant to treatment in pregnancy, Heartburn that worsens if lying down after eating in pregnancy, Heartburn unrelated to eating in pregnancy, Heartburn with acid reflux in pregnancy, Heartburn without reflux in pregnancy, Herniated disk, Hiccups, High lipoprotein level, Hoarse, Humerus burning sensation, Humerus numb, Humerus tingling, Hypoxia in pregnancy, Increased capillary refill time, Increased secretions in the lung, Indigestion in pregnancy, Infant symptoms, Inflammatory symptoms, Irregular rhythm, Kidney symptoms, Knee joint burning sensation, Knee joint cold, Knee joint numb, Knee joint sensitive, Knee joint tingling, Kneecap burning sensation, Kneecap cold, and any combinations thereof.

[0913] In one aspect, the present disclosure provides methods to activate, promote, support, improve, or increase the activity of a growth factor receptor present in, on the surface of a neoplastic cell such that the neoplastic cell in converted into a non-neoplastic cell and/or a subject carrying said cell is protected from a neoplastic disease, said methods optionally comprising the administration of a pharmaceutical association as defined herein.

[0914] In one aspect, the present disclosure provides methods to activate, promote, support, improve, or increase the tumor suppressor activity of proteins p53 and/or pRb (retinoblastoma protein) in a neoplastic cell such that the neoplastic cell in converted into a non-neoplastic cell and/or a subject carrying said cell is protected from a neoplastic disease, said methods comprising the administration of a pharmaceutical association as defined herein.

[0915] In one aspect, the present disclosure provides methods to convert a neoplastic cell (e.g. a cancer cell) into a non-neoplastic cell (e.g. a non-cancerous cell) and/or to protect a subject carrying this cell from a neoplastic disease, disorder, condition, pathology or at least one symptom thereof, which involves dampening or inhibiting cell division and/or regulating, re-establishing or restoring a cell adhesion checkpoint and/or inducing differentiation of said neoplastic cell.

### XIV. Diagnostic Methods

[0916] In one aspect, the present disclosure provides methods of identifying, diagnosing, and optionally classifying subjects on these bases, which may include clinical diagnosis, biomarker levels, and other methods known in the art.

[0917] In one aspect, the present disclosure provides a pharmaceutical association or composition as defined herein for use in a diagnostic method of a neoplastic disease (e.g. a cancer). In one example, such a diagnostic method comprises the detection of a cancer using a method described in US patent application No. 2002/0159986 A1, which is incorporated herein by reference in its entirety.

[0918] In one aspect, the present disclosure provides a diagnostic method for diagnosing of a neoplastic disease or condition comprising the provision of a pharmaceutical association or composition as defined herein, and the contacting or administration of said pharmaceutical association or composition with a body part of a subject to be diagnosed.

[0919] A method for the diagnosis of cancer in a patient, comprising obtaining a biological sample from a patient and apply fluorescent and/or radiolabeled GFR binding compounds, wherein high localisation of these compounds indicates cancer in the patient.

[0920] In one aspect, the present disclosure provides methods of determining the effectiveness of a pharmaceutical association, combination or composition as defined herein for converting a neoplastic cell into a non-neoplastic cell and/or for treating a neoplastic disease or at least one symptom thereof, comprising the administration of said pharmaceutical association to a cell; the measurement of the expression of specific differentiation and/or cancerous markers as defined herein in the cell; the comparison of the expression of said specific differentiation and/or cancerous markers in the cell to the expression of said specific differentiation and/or cancerous markers in a cell treated with a reference (or control) pharmaceutical association, compound or solvent; and determining the effectiveness of the pharmaceutical association or composition relative to the reference pharmaceutical association or compound.

### XV. Screening Methods

[0921] In one aspect, the present disclosure provides a screening method for selecting a GFR-binding compound having the ability, after being associated or combined with a bioactive carrier as defined herein (thus forming a pharmaceutical association or combination as defined herein), to convert or recode a neoplastic cell into a non-neoplastic cell.

[0922] In one aspect, the present disclosure provides a screening method for selecting a peptide or a peptidomimetic having the ability, after being associated or combined with a bioactive carrier as defined herein (thus forming a pharmaceutical association or combination as defined herein), to convert or recode a neoplastic cell into a non-neoplastic cell.

[0923] In one aspect, the present disclosure provides a screening method for selecting a peptide or peptidomimetic having the ability, after being associated or combined with a bioactive carrier as defined herein (thus forming a pharmaceutical association or combination as defined herein), to convert or recode a neoplastic cell into a non-neoplastic cell, the method comprising the steps of (a) providing a molecular model of the 3D structure coordinates of PEPREF as defined herein and (b) identifying a candidate analog having a RMSD value of 2.45 Å or less, in particular of 2 Å or less, and more particularly of 1.79 Å or less. In one particular example, step (b) is performed using the method of RMSD calculation as already defined herein

[0924] In certain embodiments, the method can be performed using a computer (i.e., in silico). In some embodiments, the method can include providing the three-dimensional models of a plurality of peptides or peptidomimetics (i.e., a library or database of peptides or peptidomimetics) and screening each compound individually. Thus, in one aspect, the method of screening peptides or peptidomimetics generally includes computationally evaluating the potential of a selected peptide(s) or peptidomimetic(s) to structurally match with the computational model of the three-dimensional structure of PEPREF. For example, this method can include the steps of (a) employing a computational approach to perform a fitting operation between the selected peptide(s) or peptidomimetic(s) and the three-dimensional structure of PEPREF; and (b) analysing the results of the fitting operation to quantify the three-dimensional structural similarities between the peptide(s) or peptidomimetic(s) and PEPREF using the RMSD procedure as defined herein.

[0925] In one aspect, the present disclosure provides a method of producing a peptide or peptidomimetic having the ability, after being associated or combined with a bioactive carrier as defined herein (thus forming a pharmaceutical association or combination as defined herein), to convert or recode a neoplastic cell into a non-neoplastic cell, the method comprising the steps of (a) providing a molecular model of the following 3D structure coordinates of PEPREF; b) identifying a candidate analog having a RMSD as defined herein of 2.45 Å or less (in particular 2, more particularly 1.79); and (c) producing the candidate analog identified in step (b). In one particular example, said method further comprising the step of determining whether the compound produced in step (c) has a neoplastic cell recoding activity. In one particular example, steps (a) and (b) are performed by means of an electronic processor. In certain embodiments, step (a) comprises storing a representation of the atomic co-ordinates of PEPREF in a computer memory.

[0926] In one aspect, the present disclosure provides a method of producing a peptide or peptidomimetic having the ability, after being associated or combined with a bioactive carrier as defined herein (thus forming a pharmaceutical association or combination as defined herein), to convert or recode a neoplastic cell into a non-neoplastic cell, the method comprising the steps of: (a) providing in a computer memory atomic X-ray crystallographic co-ordinates of PEPREF; (b) generating with a processor a molecular model having a three-dimensional shape of PEPREF; (c) identifying a candidate analog having a RMSD of 2.45 Å or less (in particular 2, more particularly 1.79); (d) producing the candidate analog identified in step (c); and (e) determining whether the candidate analog produced in step (d), once associated or combined with a bioactive carrier as defined herein (thus forming a pharmaceutical association or combination as defined herein), has the ability to convert or recode a neoplastic cell into a non-neoplastic cell. In one particular example, said method comprises the additional step of producing the peptide or peptidomimetic in a commercially useful quantity.

[0927] In one aspect, the present disclosure provides a computer system comprising: (a) a memory comprising atomic X-ray crystallographic coordinates of PEPREF; and (b) a processor in electrical communication with the memory; wherein the processor generates a molecular model having a three dimensional shape representative of PEPREF. In one particular example, said coordinates are stored on a computer readable diskette.

### XVI. Kits

[0928] The present disclosure provides a variety of kits for conveniently and/or effectively carrying out methods and uses of the present invention. Typically, kits will comprise sufficient amounts and/or numbers of components to allow a user to perform multiple treatments of a subject(s) and/or to perform multiple experiments.

[0929] In one aspect, the present disclosure provides kits for pharmaceutical association production, comprising at least one GFR-binding compound as defined herein, at least one bioactive carrier as defined herein, both provided in an amount effective to produce a pharmaceutical association to convert a neoplastic cell into a non-neoplastic cell and/or treat, prevent or diagnose a neoplastic disease when administered in-vitro, ex-vivo or in-vivo to a neoplastic cell or a subject carrying such a neoplastic cell, and packaging and instructions.

[0930] In one aspect, the present disclosure provides kits for pharmaceutical composition production, comprising a GFR-binding compound as defined herein, a bioactive carrier as defined herein, and a pharmaceutically acceptable excipient, carrier or vehicle, each of them provided in an amount effective to produce a pharmaceutical composition to convert a neoplastic cell into a non-neoplastic cell and/or treat or prevent a neoplastic disease when administered in-vitro, ex-vivo or in-vivo to a neoplastic cell or a subject carrying such a neoplastic cell, and packaging and instructions.

[0931] Suitable as solvents for use in kits of the invention include physiologically acceptable solvents, PBS, filtered and deionised water such as Milli-Q® water, alpha-MEM, DMEM and/or IMDM. All physiologically acceptable solvents suitable for implementing embodiments of the present invention are preferably deoxygenated before use.

[0932] In one example, said kit further comprises an administration device. In one example, said administration device is a dispensing device such as a syringe.

[0933] In one example, said kit comprises a first container containing a (modified) GFR-binding compound as defined herein and a second container containing a bioactive carrier such as a biomaterial.

[0934] In one particular example, said kits of the invention may suitably be provided in the form of a sterile packaging.

[0935] For example, in certain embodiments, said kits of the invention comprises more than 2, between 2 and 25, between 2 and 15, or between 2 and 10 of (modified) GFR-binding compound as defined herein, and more than 2, between 2 and 25, between 2 and 15, or between 2 and 10 (modified) GFR-binding compound as defined herein.

[0936] In one example, each (modified) GFR-binding compound and each bioactive carrier is conditioned in distinct and separated compartments, in lyophilised form, in solution or in suspension in a pharmaceutically dermatologically, prophylactically, diagnostically, imaging or cosmetically acceptable excipient, carrier or vehicle.

[0937] In one aspect, the invention discloses kit-of-parts comprising a bioactive carrier and a (modified) GFR-binding compound both as defined herein for uses and methods as defined herein.

### XVII. Sequence Listing

[0938] Examples of (modified) GFR-binding compounds as defined herein are listed in the appended sequence listing which forms an integral part of the present application.

[0939] Examples of (modified) cyclic GFR-binding compounds as defined herein are listed in the appended sequence listing which forms an integral part of the present application. (Modified) cyclic GFR-binding compounds of the present disclosure may be represented in non-cyclic, linear, form solely for the purpose of ease of representation but nevertheless remains cyclic compounds wherein the first and the last functional group (e.g. an amino acid) of the linearly represented compound are covalently connected to each other thereby forming a cyclic structure.

[0940] Pharmaceutical associations, combinations and compositions as defined in the present disclosure, has been found to lead to multiple and distinct advantages in terms of neoplastic diseases treatment.

[0941] As supported by the examples of the present application, pharmaceutical associations, combinations and compositions as defined in the present disclosure provide for a new area of treatment of neoplastic diseases by extracellularly converting or recoding neoplastic cells into functional and healthy cells. The therapy of the invention containing pharmaceutical associations, combinations or compositions as defined herein display advantages over therapies that do not contain it, such as any one of, and preferably a plurality of:
[0942] Enhanced and/or more practical and/or more efficient and/or more cost-effective and/or more adapted to the end-user needs;
[0943] Converting or recoding a neoplastic cell to induce and/or promote and/or improve self-healing and/or self-recovery thereof, particularly in a shorter period of time;
[0944] Converting a neoplastic cell into a non-neoplastic cell and/or protecting a subject from a neoplastic disease, disorder, condition, pathology, such as cancer, or symptoms thereof using non-mutagenic means;
[0945] Converting a neoplastic cell into a non-neoplastic cell and/or protecting a subject from a neoplastic disease, disorder, condition, pathology, such as cancer, or symptoms thereof using extracellular means;
[0946] Restoring a neoplastic cell ability to undergo differentiation, particularly in a shorter period of time;
[0947] Converting and/or recoding a circulating or non-circulating neoplastic cell such as a metastatic or non-metastatic cancer cell, into a non-neoplastic cell, particularly in a shorter period of time;
[0948] Protecting a subject from a neoplastic disease, disorder, condition or pathology such as cancer, and/or any symptoms thereof, particularly in a shorter period of time;
[0949] Providing and/or producing a physiologically functional and/or healthy osteoblast, osteocyte, chondroblast, chondrocyte, neuroblast, neurocyte, Sertoli cells, Leydig cell, Germ cell, Myoblast, Myocyte, keratinocyte, endothelial cells, angioblast, fibroblast, fibrocyte or podocyte from a neoplastic cell, particularly within a shorter period of time;
[0950] Re-establishing, reactivating or restoring the cell adhesion checkpoint of a neoplastic cell;
[0951] Treating a neoplastic cell without substantially inducing cell death;
[0952] Inducing quiescence of a neoplastic cell;
[0953] Dampening, reducing or suppressing cell division/proliferation of a neoplastic cell;
[0954] Activating and/or promoting and/or up-regulating anti-mitogen activity and/or tumor suppressor pathways and/or anti-oncogenic activity in a neoplastic cell;
[0955] Adapted to the treatment of any neoplastic cell;
[0956] Safer for the patient being treated as providing less or no harmful side-effects;
[0957] Offers the possibility for local treatments of neoplastic diseases;
[0958] Relies mainly or only on the activation of physiological cell mechanisms which increases the general safety of the herein defined therapy.

[0959] For example, in certain embodiments, pharmaceutical association or combinations, or compositions according to the present disclosure in which PEP1 is a peptide selected from the group consisting of SAIS (SEQ ID NO: 13570), NAIS (SEQ ID NO: 13567), SATS (SEQ ID NO: 13571) and SPIS (SEQ ID NO: 13574), have been found to lead to unexpectedly fast conversion of a cancerous cell into a healthy and functional cell of the bone lineage.

[0960] For example, in certain embodiments, pharmaceutical association or combinations, or compositions according to the present disclosure in which PEP1 is a peptide selected from the group consisting of SAIS (SEQ ID NO: 13570), NAIS (SEQ ID NO: 13567), SPIS (SEQ ID NO: 13574), EPLP (SEQ ID NO: 13564), and EPLT (SEQ ID NO: 13565), have been found to lead to unexpectedly fast conversion of a cancerous cell into a healthy and functional cell of the chondrocytic cell lineage.

[0961] For example, in certain embodiments, pharmaceutical association or combinations, or compositions according to the present disclosure in which PEP1 is a peptide selected from the group consisting of SNIT (SEQ ID NO: 13572), RPVQ (SEQ ID NO: 13568) and RSVK (SEQ ID NO: 13569), have been found to lead to unexpectedly fast conversion of a cancerous cell into a healthy and functional cell of the vascular lineage.

[0962] For example, in certain embodiments, pharmaceutical association or combinations, or compositions according to the present disclosure in which PEP1 is selected from the group consisting of NAIS (SEQ ID NO: 13567), SPIS (SEQ ID NO: 13574) and EPIS (SEQ ID NO: 13563), have been found to lead to unexpectedly fast conversion of a cancerous cell into a healthy and functional cell of the neuron lineage.

[0963] For example, in certain embodiments, pharmaceutical association or combinations, or compositions according to the present disclosure in which PEP1 is SPIN (SEQ ID NO: 13573), have been found to lead to unexpectedly fast conversion of a cancerous cell into a healthy and functional cell of the eye-retina lineage.

[0964] For example, in certain embodiments, pharmaceutical association or combinations, or compositions according to the present disclosure in which PEP1 is SPIN (SEQ ID NO: 13573), have been found to lead to unexpectedly fast conversion of a cancerous cell into a healthy and functional cell of the renal lineage.

[0965] For example, in certain embodiments, pharmaceutical association or combinations, or compositions according to the present disclosure in which PEP1 is a peptide selected from the group consisting of NAIS (SEQ ID NO: 13567), SPIS (SEQ ID NO: 13574), EPLP (SEQ ID NO: 13564) and EPLT (SEQ ID NO: 13565), have been found to lead to unexpectedly fast conversion of a cancerous cell into a healthy and functional cell of the ligament and tendon lineage.

[0966] For example, in certain embodiments, pharmaceutical association or combinations, or compositions according to the present disclosure in which PEP1 is a peptide selected from the group consisting of EPLP (SEQ ID NO: 13564), EPLT (SEQ ID NO: 13565), RSVK (SEQ ID NO: 13569) and RPVQ (SEQ ID NO: 13568), have been found to lead to unexpectedly fast conversion of a cancerous cell into a healthy and functional cell of the fibroblast lineage.

[0967] For example, in certain embodiments, pharmaceutical association or combinations, or compositions according to the present disclosure in which PEP1 is NAIS (SEQ ID NO: 13567), in which PEP2 is LKKYR, have been found to lead to unexpectedly fast conversion of a cancerous cell into a healthy and functional cell of the reproduction system lineage.

[0968] For example, in certain embodiments, pharmaceutical association or combinations, or compositions according to the present disclosure in which PEP1 is selected from the group consisting of NAIS (SEQ ID NO: 13567), SATS (SEQ ID NO: 13571), SPIS (SEQ ID NO: 13574), EPIS (SEQ ID NO: 13563) and SPIN (SEQ ID NO: 13573), have been found to lead to unexpectedly fast conversion of a cancerous cell into a healthy and functional cell of the lung cell lineage.

[0969] For example, in certain embodiments, pharmaceutical association or combinations, or compositions according to the present disclosure in which PEP1 is selected from the group consisting of RSVK (SEQ ID NO: 13569) or RPVQ (SEQ ID NO: 13568), have been found to lead to unexpectedly fast and qualitatively and quantitatively important muscle cells induction, producing highly functional differentiated cells.

[0970] For example, in certain embodiments, pharmaceutical association or combinations, or compositions according to the present disclosure in which PEP1 is SNIT (SEQ ID NO: 13572), have been found to lead to unexpectedly fast conversion of a cancerous cell into a healthy and functional cell of the blood cell lineage.

[0971] For example, in certain embodiments, pharmaceutical association or combinations, or compositions according to the present disclosure in which PEP1 is SAIS (SEQ ID NO: 13570) or NAIS (SEQ ID NO: 13567), have been found to lead to unexpectedly fast conversion of a cancerous cell into a healthy and functional cell of the adipocyte lineage.

[0972] Accordingly, it is possible to achieve the conversion of a neoplastic cell (e.g. a cancer cell) into a non-neoplastic cell (e.g. a functional and/or healthy cell of the bone, chondrocytic, muscle, vascular, neuronal, retinal, renal, ligament, tendon, fibroblast, blood, lung, adipocyte, reproduction system cell lineages) using extracellular, non-mutagenic active principles and is thus useful in the treatment of neoplastic diseases such as cancers.

[0973] The present invention provides a recoding therapy for the treatment of neoplastic diseases, conditions or disorders such as cancer and aims at providing a suitable micro-environment to the neoplastic cell containing suitable biological signals so that the neoplastic cell is able to undergo self-healing and become a functional, healthy, non-neoplastic cell.

[0974] In addition, it has been found that using the recoding therapy of the invention instead of conventional therapies allows for improved treatment selectivity in such a way that reduced or substantially no adverse side-effect is observed. Without wishing to be bound to any specific theory, this may be explained by considering that the present therapy relies on the activation of physiological cell mechanisms without imposing or forcing the treated cell to undergo e.g. apoptosis or cell cycle arrest (which would then most likely unselectively target any cells, healthy and neoplastic) but instead reestablishes the correct cellular microenvironment surrounding this neoplastic cell so that the cell is able to operate self-healing. As a result, a non-neoplastic cell i.e. a cell in which the cell cycle and/or cell adhesion checkpoint(s) need not be repaired, brought in contact with such a microenvironment would be less or not be substantially affected.

[0975] Remarkably, it has also been found that using the pharmaceutical associations or compositions as defined herein allows for the reduction (in most cases, important reduction) of the time of treatment of a neoplastic cell and by extension of a neoplastic disease in comparison with known technologies.

[0976] It is another aspect of the present invention to solve the technical problem of providing a therapy for treating neoplastic diseases being completely or at least partially devoid of one or more, preferably a plurality of the disadvantages of known treatments.

[0977] All combinations of any of the above-mentioned features described in all above part of the present description are specifically contemplated by the Applicant to be within the scope of the present invention unless contradictory in context. Examples of such combinations are detailed throughout the present description.

[0978] Further embodiments and advantages will become apparent to a skilled reader in light of the examples provided below.

### EXAMPLES

[0979] Disclosed and described, it is to be understood that this invention is not limited to the particular examples, process steps, and materials disclosed herein as such process steps and materials may vary somewhat. It is also to be understood that the terminology used herein is used for the purpose of describing particular embodiments only and not intended to be limiting since the scope of the present invention will be limited only by the appended claims and equivalents thereof.

[0980] The following Examples are representative of techniques employed by the inventor in carrying out aspects of the present invention. It should be appreciated that while these techniques are exemplary of preferred embodiments for the practice of the invention, those of skill in the art, in light of the present disclosure, will recognize that numerous modifications can be made without departing from the spirit and intended scope of the invention.

[0981] The following starting materials and reagents were used:
[0982] Apatite ceramics (also called apatite or ceramic in the present invention) were synthetized as described in Mater Res. 2004; 7(4): 625-630.
[0983] Titanium was obtained from Goodfellow®.
[0984] Hydrogel (poly(acrylamide-co-acrylic acid) gel) was synthetized as described in Langmuir 2011; 27(22):13635-42.
[0985] PEEK was obtained from Goodfellow®.
[0986] PET (Poly(ethylene terephthtalate) was obtained from Goodfellow®.
[0987] Type-I collagen sponge was obtained from Sigma®.
[0988] Hexane was obtained from Sigma®.
[0989] 3-succinimidyl-3-maleimidopropionate (SMP) was obtained from Sigma®.
[0990] DMF was obtained from Sigma®.
[0991] PBS 1× was obtained from Gibco®.
[0992] 3-(ethoxydimethylsilyl)propylamine was obtained from Sigma®.
[0993] Ammonium persulfate was obtained from Biorad®.
[0994] N,N,N′,N′-tetramethylethylenediamine was obtained from Aldrich®.
[0995] Acrylamid was obtained from Merck®.
[0996] Acrylic acid was obtained from Merck®.
[0997] N,N-methylene-bis-acrylamide was obtained from Merck®.
[0998] NaOH was obtained from Aldrich®.
[0999] N,N,N′,N′-tetramethylethylenediamine was obtained from Aldrich®.
[1000] Dimethylaminopropyl-3-ethylcarbodiimide hydrochloride was obtained from Aldrich®.
[1001] N-hydroxysuccinimide was obtained from Aldrich®.
[1002] 2-(N-morpholino)-ethane sulfonic acid was obtained from Aldrich®.
[1003] MilliQ water: is water characterised in terms of resistivity (typically 18.2 MΩ·cm at 25° C.).
[1004] Low glucose Dulbecco's Modified Eagle Medium (DMEM) was obtained from Invitrogen®
[1005] Minimum Essential Medium Eagle without ascorbic acid (αMEM) was obtained from Invitrogen®.
[1006] All of the cell culture experiments were carried out without any serum in the medium for the first 8 hours of culture.
[1007] Osteosarcoma cells: MG63 cells were obtained from ATCC®. These cells were cultured in DMEM (Eagle's Minimum Essential Medium) medium supplemented with 10% fetal calf serum (FCS) and 1% penicillin/streptomycin. All cells were used at a low passage number (passage 10), were subconfluently cultured and were seeded at 10⁴ cells/cm² for the purpose of the experiments.
[1008] Chondrosarcoma cells: Hs819.T cells were obtained from ATCC®. These cells were cultured in DMEM (Eagle's Minimum Essential Medium) medium supplemented with 10% fetal calf serum (FCS) and 1% penicillin/streptomycin. All cells were used at a low passage number (passage 10), were subconfluently cultured and were seeded at 10⁴ cells/cm² for the purpose of the experiments.
[1009] Rhabdomyosarcoma cells: A-673 cells were obtained from ATCC®. These cells were cultured in DMEM (Eagle's Minimum Essential Medium) medium supplemented with 10% fetal calf serum (FCS) and 1% penicillin/streptomycin. All cells were used at a low passage number (passage 10), were subconfluently cultured and were seeded at 10⁴ cells/cm² for the purpose of the experiments.
[1010] Adenocarcinoma cells: HCC4006 cells were obtained from ATCC®. These cells were cultured in RPMI-1640 medium (obtained from ATCC®) supplemented with 10% fetal calf serum (FCS) and 1% penicillin/streptomycin. All cells were used at a low passage number (passage 10), were subconfluently cultured and were seeded at 10⁴ cells/cm² for the purpose of the experiments.
[1011] CMFDA is a Cell Tracker Green obtained from Invitrogen®.
[1012] DAPI was obtained from Sigma®.
[1013] Fetal bovine serum (FBS) was obtained from Gibco®.
[1014] Penicillin/streptomycin was obtained from Invitrogen®.
[1015] The AlamarBlue® assay was obtained from Molecular Probes®.
[1016] Anti phospho-p53 antibody was obtained from Santa Cruz Biotechnology®,
[1017] Anti pRB antibody was obtained from Santa Cruz Biotechnology®,
[1018] Monoclonal anti-integrin (extracellular domain) αv, α5, α3, α4, β1, β3, β5 and β9 antibodies were obtained from Santa Cruz Biotechnology®,
[1019] Cell cytoskeletal filamentous actin (F-actin) was visualized by Alexa Fluor® 488 phalloidin Sigma® labeling.
[1020] Monoclonal anti-vinculin antibody (clone hVIN-1, produced in mouse) was obtained from Sigma®.
[1021] Primers for Cyclin D1: 5′-CCGTCCATGCGGAAGATC-3′ (Forward) (SEQ ID NO: 13862) and 5′-GAAGACCTCCTCCTCGCACT-3′ (Reverse) (SEQ ID NO: 13863) were obtained from Invitrogen®.
[1022] Primers for Cyclin D2: 5′-CATCCAACCGTACATGCGCAG-3′ (Forward) (SEQ ID NO: 13864) and 5′-CATGGCCAGAGGAAAGACCTC-3′ (Reverse) (SEQ ID NO: 13865) were obtained from Invitrogen®.
[1023] Primers for Cyclin D3: 5′-TGATTTCCTGGCCTTCATTC-3′ (Forward) (SEQ ID NO: 13866) and 5′-CGGGTACATGGCAAAGGTAT-3′ (Reverse) (SEQ ID NO: 13867) were obtained from Invitrogen®.
[1024] Primers for Paxillin: 5′-AATTCCAGTGCCTCCAACAC-3′ (Forward) (SEQ ID NO: 13868) and 5′-GAGCTCATGACGGTAGGTGA-3′ (Reverse) (SEQ ID NO: 13869) were obtained from Invitrogen®.
[1025] Primers for Vinculin: 5′-GCCAAGCAGTGCACAGATAA-3′ (Forward) (SEQ ID NO: 13870) and 5′-TTCCTTTCTGGTGTGTGAAGC-3′ (Reverse) (SEQ ID NO: 13871) were obtained from Invitrogen®.
[1026] Primers for DMP-1: 5′-AGCATCCTGCTCATGTTCCTTT-3′ (Forward) (SEQ ID NO: 13872) and 5′-GAGCCAAATGACCCTTCCATT-3′ (Reverse) (SEQ ID NO: 13873) were obtained from Invitrogen®.
[1027] Primers for Sclerostin: 5′-CTTAGTTTTCTCAGTCTGTGGTTGAAAT-3′ (Forward) (SEQ ID NO: 13874) and 5′-AGAGTACCCCGAGCCTCC-3′ (Reverse) (SEQ ID NO: 13875) were obtained from Invitrogen®.
[1028] Primers for RANK-L: 5′-CTCAGCCTTTTGCTCATCTCACT-3′ (Forward) (SEQ ID NO: 13876) and 5′-CCAAGAGGACAGACTCACTTTATGG-3′ (Reverse) (SEQ ID NO: 13877) were obtained from Invitrogen®.
[1029] Primers for MLC-1: 5′-AGAAGGGCTCCATGTCTGACA-3′ (Forward) (SEQ ID NO: 13878) and 5′-AAGATTTCAGGACCCGAGCAG-3′ (Reverse) (SEQ ID NO: 13879) were obtained from Invitrogen®.
[1030] Primers for GATA-4: 5′-AGGCCTCTTGCAATGCGGA-3′ (Forward) (SEQ ID NO: 13880) and 5′-CTGGTGGTGGCGTTGCTGG-3′ (Reverse) (SEQ ID NO: 13881) were obtained from Invitrogen®.
[1031] Primers for α-Sarcomeric actin: 5′-GACCACAGCTGAACGTGAGA-3′ (Forward) (SEQ ID NO: 13882) and 5′-CATAGCACGATGGTCGATTG-3′ (Reverse) (SEQ ID NO: 13883) were obtained from Invitrogen®.
[1032] Primers for Sox9: 5′-GACTTCCGCGACGTGGAC-3′ (Forward) (SEQ ID NO: 13884) and 5′-GTTGGGCGGCAGGTACTG-3′ (Reverse) (SEQ ID NO: 13885) were obtained from Invitrogen®.
[1033] Primers for IBSP: 5′-TGCCTTGAGCCTGCTTCC-3′ (Forward) (SEQ ID NO: 13886) and 5′-GCAAAATTAAAGCAGTCTTCATTTTG-3′ (Reverse) (SEQ ID NO: 13887) were obtained from Invitrogen®.
[1034] Primers for Collagen IV: 5′-CCTGGTCTTGAAAGGTGATAAG-3′ (Forward) (SEQ ID NO: 13888) and 5′-CCCGCTATCCCTTGATCTC-3′ (Reverse) (SEQ ID NO: 13889) were obtained from Invitrogen®.
[1035] Primers for Vimentin: 5′-TGTCCAAATCGATGTGGATGTTTC-3′ (Forward) (SEQ ID NO: 13890) and 5′-TTGTACCATTCTTCTGCCTCCTG-3′ (Reverse) (SEQ ID NO: 13891) were obtained from Invitrogen®.
[1036] Primers for MMP-9: 5′-AATCTCTTCTAGAGACTGGGAAGG AG-3′ (Forward) (SEQ ID NO: 13892) and 5′-AGCTGATTGACTAAAGTAGCTGGA-3′ (Reverse) (SEQ ID NO: 13893) were obtained from Invitrogen®.
[1037] Primers for α-SMA: 5′-CCGACCGAATGCAGAAGGA-3′ (Forward) (SEQ ID NO: 13894) and 5′-ACAGAGTATTTGCGCTCCGAA-3′ (Reverse) (SEQ ID NO: 13895) were obtained from Invitrogen®.
[1038] Primers for GAPDH: 5′-GCAGTACAGCCCCAAAATGG-3′ (Forward) (SEQ ID NO: 13896) and 5′-ACAAAGTCCGGCCTGTATCCAA-3′ (Reverse) (SEQ ID NO: 13897) were obtained from Invitrogen®.
[1039] All of the peptides were synthetized using conventional solution and/or solid phase peptide synthesis methods.
[1040] All of the experiments were performed with a concentration of 400 ng/mL of GFR-binding compound(s) as defined herein.
[1041] All cell culture experiments were performed with cultures on plastic coated with type-I collagen in order to mimic the physiological conditions of the human body.

[1042] The following general methods and procedures were used:

[1043] X-Ray Photoelectron Spectroscopy:

[1044] For X-ray photoelectron spectroscopy, AVG Scientific ESCALAB photoelectron spectrometer was used for the surface analysis with a non-monochromatized MgK 1253.6 eV source of 100 W. The area of the analytical X-ray spot on the sample surface was about 200 μm². A 45° insert angle that corresponds to about 5 nm of analyzed depth was used. A flood gun was used for charge compensation. Acquisition of high resolution spectra was performed at constant pass energy of 20 eV.

[1045] Immunostaining:

[1046] The cells were first fixed for 20 min with 4% paraformaldehyde/PBS at 4° C. After fixation, the cells were permeabilized in PBS containing 1% Triton X-100 for 15 min. Protein immunofluorescent visualization was performed by first treating the cells with 1% (v/v) specific monoclonal antibodies for 1 hour at 37° C. Then the samples were incubated with Alexa Fluor® 568 or 647 (F(ab′)₂ fragment of IgG(H+L)) during 30 min at room temperature. The cell nuclei were counterstained in 20 ng/mL DAPI for 10 min at room temperature.

[1047] Quantification of Positive Contact Numbers and Areas:

[1048] For this type of quantification the freeware image analysis ImageJ® software was used. The raw image was first converted to an 8-bit file, and then the unsharp mask feature was used (settings 1:0.2) to remove the image background (rolling ball radius 10). After smoothing, the resulting image, which appears similar to the original photomicrograph but with minimal background, was then converted to a binary image by setting a threshold. Threshold values were determined empirically by selecting a setting, which gave the most accurate binary image for a subset of randomly selected photomicrographs. The cell area was determined by manual delineation on raw fluorescent images. Total contact area and mean contact area per cell were calculated by “analyse particules” in ImageJ®. A minimum of 50 cells per condition were analyzed.

[1049] Quantitative Real Time Polymerase Chain Reaction (RT-PCR):

[1050] After 24 hours of culture, total RNA was extracted by using the RNeasy total RNA kit (Qiagen®) according to the manufacturer's instructions. Purified total RNA was used as a template in order to make cDNA by a reverse transcription reaction (Gibco Brl®) with random primers (Invitrogen®). The cDNA was then used as a template for a real-time PCR amplification in the presence of SYBR green reagents (Bio-Rad®) by using a thermocycler (iCycler, Biorad®). Data were analyzed with the iCycler IQ™® software and compared by the ΔΔCt method. Briefly, the mean Ct value of the target gene was normalized to its averaged Ct values of the housekeeping gene (GAPDH) to give a ΔCt value, which was then normalized to a control sample to obtain a ΔΔCt value. The results were obtained from two series of experiments performed in triplicate.

[1051] Western Blot:

[1052] After 24 hours of culture, cells were permeabilized (10% SDS, 25 mM NaCl, 10 nM pepstatin and 10 nM leupeptin in distilled water and loading buffer), boiled for 10 minutes and resolved by reducing PAGE (Invitrogen). Proteins were transferred onto nitrocellulose, blocked, and labeled with HRP-conjugated antibodies (Invitrogen). Integrin αv, α5, +3, α4, β1, β3, β5 and β9 were blotted by treating the nitrocellulose with monoclonal anti-integrin (extracellular domain) αv, α5, +3, α4, β1, β3, β5 and β6 antibodies (Santa Cruz Biotechnology). Phosphor-Smad1/5/8 was blotted by treating the nitrocellulose with monoclonal anti-p-Smad1/5/8 (Santa Cruz Biotechnology). For all of the experiments the western blot was performed in triplicate, along with an additional blot for actin and coomassie blue staining to ensure constant protein load among samples.

[1053] Determination of Peptide Densities by High Resolution μ-Imager:

[1054] In contrast to scintillation counting, beta-imager performances in the field of sensitivity, linearity and spatial resolution give a real interest to this system as a new imaging device for solid surface. The detection principle is no longer based on the counting of electron avalanches produced in the gas, but it is based on the analysis of light emitted during the interaction. Beta radioactivity is directly detected by means of a parallel plate avalanche chamber, which is particularly well suited for qualitative and quantitative autoradiography.

[1055] Quantitatively, peptide concentration was evaluated by grafting ¹³¹I-peptide alone and by grafting ¹³¹I-peptide in the presence of RGD peptides. For example, polymer samples were placed in a solution of ¹³¹I-peptide diluted in peptide solution (1×10⁻³ M). Radioactivity of this latter solution was adjusted to 6 μCi/mL. The amount C of radiolabeled ¹³¹I-peptide grafted onto the surface (in nmol/mm²) was calculated according to the following formula:

C=A×C₀/A₀

where A is activity of the as-treated samples (in counts per minute/mm²); C₀ the peptide concentration in the incubation solution (in g/L); A₀ the activity of 1 mL of mother solution (in cpm/L). This latter activity was calibrated by using the b-Vision™ Biospace software to determine the relationship between the μCi and cpm/L units. Such a fitting was performed by measuring the activities of given dilute solutions. By measuring the radioactivity of 10 solutions with β-Imager, A0 was determined to be equal to 1.0 10¹⁰ cpm/L.

[1056] To evaluate the stability of the grafted peptides in water, the ¹³¹I-peptides activity (in cpm/mm²) was calibrated for each analysis. Calibration of the entire probed area was first performed by setting the signal corresponding to the beta activity of 14C standard slides to a constant level. The ¹³¹I-peptides radioactive decay was finally taken into account since its half-life (90 days) is not negligible vs. the experiments duration. Moreover, the high resolution μ-imager provides information about the radiolabeled amino acids distributed onto the surface and proves the homogeneity of the grafting.

[1057] Statistical Analysis:

[1058] In terms of real-time PCR assay, all of the data were expressed as mean±standard error, and analyzed statistically by the paired Student's t test method.
[1059] General procedures used for the covalent association between GFR-binding compound(s) and bioactive carrier are as follows:
   Method 1: Surface Preparation and Covalent Association with Hydrogels (Such as PLLA)

[1060] The preparation of poly(acrylamide-co-acrylic acid) gel substrates was shown as an example in order to illustrate the effect of the GFR-binding compound(s) as defined herein. The synthesis of hydrogels is based on acrylamide and acrylic acid by polymerization in the presence of N,N′-methylene-bis-acrylamide as a cross-linker in an aqueous medium. Practically, 0.3 g of acrylamide (AM, Merck) has been dissolved in 5 mL of PBS 1× (Invitrogen). 30 μL of acrylic acid (AA, Merck), then x g (function as the stiffness) of N,N-methylene-bis-acrylamide was added under stirring. Then, a NaOH solution (1M, Aldrich) was added dropwise to reach a pH 8. The formation of hydrogel proceeded via free radical polymerization. The starting solution was degassed during 10 min by bubbling nitrogen in order to remove the oxygen which acts as an inhibitor for the free radical polymerization process. Nitrogen atmosphere was maintained above the solution and 50 μL (corresponding to 1/100 of the total volume) of Ammonium persulfate 10% (Biorad), (free radical initiator) and then 5 μL (corresponding to 1/1000 of total volume) of N,N,N′,N′-tetramethylethylenediamine (catalyst, Aldrich) were added. The polymerizing solution was vortexed gently. Promptly, 0.5 mL of this gel solution was placed before polymerization on a glass slide and another slide was placed on the top of this structure. Reactivity ratios calculated by the Finemann-Ross and Kelen-Tudos methods showed that the copolymers were random with a reactivity ratio of rAM=3.76 and rAA=0.28. The materials obtained here have various stiffnesses ranging from 0.1 to 600 kPa.

[1061] Chemical functionalization with GFR-binding compound(s) as defined herein of poly(acrylamide-co-acrylic acid) gel substrates was performed via the —COOH (carboxyl) functions of their surface. Hydrogels were immersed in a solution of dimethylaminopropyl-3-ethylcarbodiimide hydrochloride (EDC, 0.2 M)+N-hydroxysuccinimide (NHS, 0.1 M) in 2-(N-morpholino)-ethane sulfonic acid (MES buffer, 0.1 M in MilliQ water) overnight at room temperature without stirring and then rinsed in MilliQ water (50 mL during 30 min). The immobilization of the GFR-binding compound(s) as defined herein was achieved in a solution of peptides/PBS 1× (C=10⁻³ M) for 18 hours at room temperature by using an orbital shaker. After grafting, the modified hydrogels were rinsed with PBS 1× for one week.

Method 2: Covalent Association with Solid Materials (Such as Ceramics or Titanium)

[1062] The material modifications were performed in a controlled Atmosphere (Ar Atmosphere, Glove Box). The strategy for covalent modification of GFR-binding compound(s) as defined herein involved (1) grafting of (3-aminopropyl)-triéthoxysilane (concentration of 1×10⁻²M, 4 hours) onto the surface of the biopolymer, (2) substitution of the terminal amine by a hetero-bifunctional cross-linker, a 3-succinimidyl-3-maleimidopropionate (concentration of 1×10⁻³M, 4 hours) in order to (3) reacting of the “outer” maleimide group with the GFR-binding compound(s) as defined herein (concentration of 1×10⁻³M, 18 hours) via a thiol group present in the terminal cysteine. After grafting, the modified materials were rinsed with PBS 1× buffer for 5 days.

### Example 3: Covalent Association with Polymers (Such as PET or PEEK)

[1063] The polymer used in this study is poly(ethylene terephthalate) (PET). The polymers were first treated in order to create —COOH (carboxyl) functions on the PET surfaces from —OH (hydroxyl) functions. Next, the PET-COOH samples were immersed in a solution of dimethylaminopropyl-3-ethylcarbodiimide hydrochloride (EDC, 0.2 M)+N-hydroxysuccinimide (NHS, 0.1 M) in 2-(N-morpholino)-ethanesulfonic acid (MES) buffer (0.1 M in MilliQ water) and the samples were rinsed in MilliQ water (50 mL for 30 min). The same protocol was used for all the polymers containing —OH (hydroxyl) functions on their extreme surface. Finally, the covalent immobilization of the peptides was achieved by using a solution of peptides/1×PBS (C=10⁻³ M) incubated for 18 hours at room temperature. After grafting, the materials were rinsed in MilliQ water (100 ml) for 1 week.

### Example 1: Covalent Association Between GFR-Binding Compounds of the Present Disclosure and Titanium

[1064] The bioactive carrier modifications were performed in a controlled atmosphere (Ar Atmosphere, Glove Box). The strategy for covalent association or immobilization of GFR-binding compounds involved (1) the association or grafting of (3-aminopropyl)-triethoxysilane (concentration of 1×10⁻² M, 4 hours) onto the surface of the bioactive carrier, (2) substitution of the terminal amine by a hetero-bifunctional cross-linker: a 3-succinimidyl-3-maleimidopropionate (concentration of 1×10⁻³ M, 4 hours) in order to (3) react the “outer” maleimide group with a GFR-binding compound (concentration of 1×10⁻³ M, 24 hours) via a thiol group present in the terminal cysteine. After covalent association, the covalent pharmaceutical associations were rinsed with Phosphate Buffered Saline (PBS 1×) buffer for 5 days. PBS is a buffer solution commonly used in the biological research. It is a water-based salt solution containing sodium phosphate, sodium chloride and, in some formulations, potassium chloride and potassium phosphate. The osmolarity and ion concentrations of the solutions match those of the human body (isotonic) and are thus physiological and non-toxic to the cells.

[1065] The bioactive carrier surface was characterized by covalently associating fluorescent GFR-binding compounds (herein SEQ ID NO: 1 coupled to fluorescein isothiocyanate (FITC), FIG. 1) and X-ray photoelectron spectroscopy (Table 1). The X-ray photoelectron spectroscopy was performed as described above.

[1066] The results presented in Table 1 were obtained with a titanium alloy material (Ti6Al4V metal alloy pellets) as bioactive carrier covalently associated with GFR-binding compounds of SEQ ID NO: 2 to 6.

TABLE 1

| Name | At. % C1s | At. % N1s |
|---|---|---|
| Titanium | 29.07 | no detection |
| Titanium grafted covalently with SEQ ID NO: 2 | 43.65 | 5.87 |
| Titanium grafted covalently with SEQ ID NO: 3 | 42.02 | 5.47 |
| Titanium grafted covalently with SEQ ID NO: 4 | 39.95 | 5.11 |
| Titanium grafted covalently with SEQ ID NO: 5 | 40.58 | 5.2 |
| Titanium grafted covalently with SEQ ID NO: 6 | 44.01 | 4.89 |

### Example 2: Covalent Association Between GFR-Binding Compound(s) of the Present Disclosure and PEEK

[1067] A polyetheretherketone (PEEK) was treated with ethylene diamine (NH₂═NH₂) to create —NH₂ (amine) functions on the PEEK surfaces from ketone (═O) functions. Next, the PEEK-NH₂ samples were immersed in a solution of a hetero-bifunctional cross-linker: a 3-succinimidyl-3-maleimidopropionate (concentration of 1×10⁻³ M, 4 hours) in order to react with the “outer” maleimide group with the GFR-binding compound(s) of SEQ ID NO: 7 (concentration of 1×10⁻³ M, 24 hours) via a thiol group present in the terminal cysteine thereof. After covalent association, the pharmaceutical association was rinsed with PBS 1× for 5 days. The bioactive carrier surface was characterized by covalently associating fluorescent GFR-binding compounds of SEQ ID NO: 7 and by other methods such as X-ray photoelectron spectroscopy (Table 2). The X-ray photoelectron spectroscopy was performed as described above.

[1068] The results presented in Table 2 were obtained by with a PEEK material as a bioactive carrier covalently associated with a GFR-binding compound of SEQ ID NO: 7.

TABLE 2

| Name | At. % C1s | At. % N1s |
|---|---|---|
| PEEK | 86.56 | no detection |
| PEEK grafted covalently with SEQ ID NO: 7 | 71.61 | 4.98 |

### Example 3: Covalent Association Between GFR-Binding Compound(s) of the Present Disclosure and PLLA

[1069] PLLA (Polylactic acid) was immersed in a solution of dimethylaminopropyl)-3-ethylcarbodiimide hydrochloride (EDC, 0.2 M)+N-hydroxysuccinimide (NHS, 0.1 M) in (2-(N-morpholino)-ethanesulfonic acid (MES buffer, 0.1 M in MilliQ water) and then rinsed in MilliQ water (during 30 min). The covalent association was performed in a solution of GFR-binding compounds of SEQ ID NO: 8 (concentration of 1×10⁻³ M, 18 hours, room temperature). After the covalent association, the pharmaceutical association was rinsed with PBS 1× for 5 days.

[1070] The bioactive carrier surface was characterized by covalently associating fluorescent GFR-binding compounds of SEQ ID NO: 8 and by using other methods such as X-ray photoelectron spectroscopy (Table 3). The X-ray photoelectron spectroscopy was performed as described above.

[1071] The results presented in Table 3 were obtained by using PLLA as bioactive carrier covalently associated with a GFR-binding compound of SEQ ID NO: 8.

TABLE 3

| Name | At. % C1s | At. % N1s |
|---|---|---|
| PLLA | 69.02 | no detection |
| PLLA grafted covalently with SEQ ID NO: 8 | 72.31 | 5.07 |

### Example 4: Non-Covalent Association Between GFR-Binding Compound(s) and Bioactive Carrier(s) of the Present Disclosure

[1072] Non-covalent associations of the bioactive carriers were performed under atmospheric conditions (air) at room temperature (about 22° C.). The non-covalent association was carried out using a mixture of GFR-binding compound of SEQ ID NO: 9 (concentration of 1×10⁻³ M) with the apatite ceramics or a mixture of GFR-binding compound of SEQ ID NO: 10 (concentration of 1×10⁻³ M) with the type-I collagen sponge. The non-covalent pharmaceutical associations were characterized by covalently associating fluorescent GFR-binding compounds of SEQ ID NO: 9 and 10 (covalently bound to fluorescein isothiocyanate (FITC), FIG. 1). The results shown in FIG. 1 were obtained from experiments performed with apatite ceramics and a type-I collagen sponge and demonstrates that the interaction between the GFR-binding compounds and the apatite ceramics or the type-I collagen is stable as no significant release of GFR-binding compounds was observed after 3, 7 or 10 days (FIGS. 2a and b).

### Example 5: Osteosarcoma Recoding

[1073] Selected GFR-binding compounds (SEQ: ID NO: 11 to 20) were covalently associated with PET using a method described above and contacted with human osteosarcoma cells (obtained from ATCC®). The mixtures tumor cells/pharmaceutical association were then cultured in Dulbecco's Modified Eagle Medium (DMEM, Invitrogen®) supplemented with 10% (v/v) fetal bovine serum (FBS), 1% penicillin/streptomycin and incubated in a humidified atmosphere containing 5% (v/v) C02 at 37° C. All of the cell culture experiments were performed without any serum in the medium for the first 8 hours of culture. All cells were used at a low passage number (≤passage 10), were subconfluently cultured and were seeded at 10 000 cells/cm² for the purpose of the experiments.

[1074] The cell phenotype was analyzed after 24 hours of cell culture. The vast majority (>98%) of the human osteosarcoma cells adhere, spread, and differentiate into osteocyte cells as confirmed by analysis of DMP-1 (Dentin matrix acidic phosphoprotein 1), Sclerostin and RANK-L (receptor activator of nuclear factor kappa B ligand) expression (FIG. 3a). During cell recoding, osteosarcoma cells undergo important changes in their cell morphology such as cell shape modification, cell body size reduction and increase in cell processes in order to obtain the characteristic osteocyte morphology as shown in FIG. 3b wherein, after 18 and 24 h of cell culture, the cells were immunostained with labeled antibodies against actin in order to visualize and monitor the actin cytoskeleton, previously reported to play an important role in the establishment of the osteocyte morphology (FIG. 3b). The cells were also stained with antibodies against vinculin as a cytoplasmic focal cell adhesion marker in order to visualize in detail the cell morphology. The observed morphologies of the recoded cells were compared with the osteosarcoma cell morphology, immunostained using the same procedure. After 24 hours of cell culture the immunofluorescence labeling shows that the cell shape has already undergone some significant modifications and that the dendritic processes have already started (FIG. 3b). These cells presented a characteristic dendritic-like morphology, a total reduction in cell body volume of around 50% and expressed a set of known osteocytic markers. These results demonstrate that GFR-binding compounds associated with bioactive carrier both as defined herein induce the recoding of human osteosarcoma cells into osteocytes in a short period of time (24 hours).

### Example 6: Rhabdosarcoma Recoding

[1075] Selected GFR-binding compounds (SEQ: ID NO: 21 to 30) were covalently associated with PET using a method described above and contacted with human rhabdosarcoma cells (obtained from ATCC®). The mixtures tumor cells/pharmaceutical association were then cultured in Dulbecco's Modified Eagle Medium (DMEM, Invitrogen®) supplemented with 10% (v/v) fetal bovine serum (FBS), 1% penicillin/streptomycin and incubated in a humidified atmosphere containing 5% (v/v) C02 at 37° C. All cell culture experiments were performed without any serum in the medium for the first 8 hours of culture. All cells were used at a low passage number (≤passage 10), were subconfluently cultured and were seeded at 10 000 cells/cm² for the purpose of the experiments.

[1076] It was observed that these tumor cells were converted into muscle cells (myocyte like-cells) in the presence of pharmaceutical associations of the invention by analyzing the expression of the myogenic biomarkers MLC-1 (myocyte light chain 1), GATA-4 and □-Sarcomeric actin. An increased expression of these genes was observed after 24 hours of culture (FIG. 4). For that, a Quantitative Real Time PCR was performed as described in the Methods section.

### Example 7: Mesenchymal Chondrosarcoma Recoding

[1077] Selected GFR-binding compounds (SEQ: ID NO: 31 to 40) were covalently associated with PET using a method described above and contacted with human rhabdosarcoma cells (obtained from ATCC®). The mixtures tumor cells/pharmaceutical association were then cultured in Dulbecco's Modified Eagle Medium (DMEM, Invitrogen®) supplemented with 10% (v/v) fetal bovine serum (FBS), 1% penicillin/streptomycin and incubated in a humidified atmosphere containing 5% (v/v) C02 at 37° C. All cell culture experiments were performed without any serum in the medium for the first 8 hours of culture. All cells were used at a low passage number (≤passage 10), were subconfluently cultured and were seeded at 10 000 cells/cm² for the purpose of the experiments.

[1078] It was observed that these tumor cells were converted into cartilage cells (chondrocyte like-cells) in the presence of pharmaceutical associations of the invention by analyzing the expression of the chondrocytic biomarkers Sox9, IBSP (Sialoprotein II) and collagen IV. An increased expression of these genes was observed after 24 hours of culture (FIG. 5). For that a Quantitative Real Time PCR was performed as described in the Methods section.

### Example 8: Adenocarcinoma Recoding

[1079] Selected GFR-binding compounds (SEQ: ID NO: 41 to 50) were covalently associated with PET using a method described above and contacted with human adenocarcinoma cells (obtained from ATCC®). The mixtures tumor cells/pharmaceutical association were then cultured in RPMI-1640 medium supplemented with 10% (v/v) fetal bovine serum (FBS), 1% penicillin/streptomycin and incubated in a humidified atmosphere containing 5% (v/v) C02 at 37° C. All cell culture experiments were performed without any serum in the medium for the first 8 hours of culture. All cells were used at a low passage number (≤passage 10), were subconfluently cultured and were seeded at 10 000 cells/cm² for the purpose of the experiments. It was observed that these tumor cells were converted into epithelial cells (fibrocyte like-cells) in the presence of pharmaceutical associations of the invention by analyzing the expression of the fibrocystic biomarkers MMP-9, Vimentin and α-SMA. An increased expression of these genes was observed after 24 hours of culture (FIG. 6). For that a Quantitative Real Time PCR was performed as described in the Methods section.

### Example 9: Recoding of Neoplastic Cells Demonstrated by Significant Reduction of Proliferation Markers

[1080] Neoplastic cells (in this example osteosarcoma cells) were cultured on pharmaceutical associations comprising PET as a bioactive carrier and one of GFR-binding compounds of SEQ ID NO: 11 to 14, 24 to 26 and 51 to 63. A rapid (24 hours) decrease of the tumor markers was observed (FIG. 7). The adhesion checkpoint then activates the tumor suppressor proteins p53 and pRB. It was observed that, in tumor cells cultured on pharmaceutical associations of the invention, the expression of p53 decreases as demonstrated by quantification of protein expression level (immunofluorescence staining and quantification using ImageJ as described in the general methods section) (FIG. 7A) and the pRB is dephosphorylated as demonstrated by a quantification of protein phosphorylation level (immunofluorescence staining and subsequent quantification by using the ImageJ software as described in the general methods section) (FIG. 7B).

### Example 10: Adhesion Checkpoint Activation

[1081] Neoplastic cells (in this example osteosarcoma cells) were cultured on pharmaceutical associations comprising PET as a bioactive carrier and one of GFR-binding compounds of SEQ ID NO: 12, 19, 30 or 39. The main signaling pathways include: Ras/MAP kinase, FAK/Src kinase and PIP2 which are decreased after 24 hours as shown by western blot quantifications (FIG. 8). This demonstrated by the absence of phosphorylation at Thr202 and Tyr204 on ERK (FIG. 8A). Moreover, no phosphorylation at Thr416 but phosphorylation of Tyr527 was observed on Src kinase (FIG. 8B). Finally, a decrease of 3-phosphoinositide-dependent protein kinase 1 (PDK1) protein expression was also was observed (FIG. 8C).

### Example 11: Decrease of Paxillin and Vinculin Gene Expression

[1082] Neoplastic cells (in this example osteosarcoma cells) were cultured on pharmaceutical associations comprising PET as a bioactive carrier and one of GFR-binding compounds of SEQ ID NO: 12, 19, 30 or 39. After 24 hours, the Paxillin and Vinculin gene expression decreased as shown by RT-PCR (FIG. 9).

### Example 12: Cyclin D Profile

[1083] Neoplastic cells (in this example osteosarcoma cells) were cultured on pharmaceutical associations comprising PET as a bioactive carrier and one of GFR-binding compounds of SEQ ID NO: 12, 19, 30 or 39. The Cyclin D (the arithmetic mean of Cyclin D1, Cyclin D2 and Cyclin D3) gene expression decreased after the first 30 min of cell culture as shown by RT-PCR (FIG. 10). These data indicate the entry of the cells into G0 quiescence phase.

### Example 13: GFR-Binding Compound Density Calculation

[1084] The density of the GFR-binding compound(s) on bioactive carriers is measured using radio-labeled molecules according to the procedure described above in the Methods section and was found to lie between 0.3 and 2.8 pmol/mm² depending on the size of the GFR-binding compound (SEQ ID No: 13, 20 or 56) (FIG. 11).

### Example 14: Growth Factor Receptor Activation

[1085] The data summarized in Table 4 below demonstrate that the tumor cell recoding action ((in this example: human osteosarcoma cells, MG63, via quantification of pRB) of pharmaceutical associations according to certain embodiments of the present disclosure involves the activation of growth factor receptors as demonstrated by the activation of the Smad1/5/8 signaling pathway (via quantification of western blots of phospho-smad1/5/8):

TABLE 4

| | | p-Smad1/ | pRB |
|---|---|---|---|
| SEQ ID No | AA sequences | 5/8 (%) | (%) |
| SEQ ID NO: 64 | SIPKASSTPTELSPINMLYF | 37 | 23 |
| SEQ ID NO: 65 | TKPTSTPTKLSPINMLYF | 36 | 10 |
| SEQ ID NO: 66 | YVPKPSSTPTKLSPINMLYF | 38 | 8 |
| SEQ ID NO: 67 | ASAAPSSVPQALSSLSILFF | 38 | 15 |
| SEQ ID NO: 68 | ASASPSSVSQDLSSLSILFF | 40 | 14 |
| SEQ ID NO: 69 | VVPKPSSAPTQLEPISILYL | 39 | 20 |
| SEQ ID NO: 70 | AVPKASSAPTKLEPISILYL | 67 | 21 |
| SEQ ID NO: 71 | KVGKASSVPTKLEPISILYL | 66 | 17 |
| SEQ ID NO: 72 | SSVKSQPSRVHHKPLSMLYV | 47 | 19 |
| SEQ ID NO: 73 | RNVQSRPTQVQLKPLSMLYV | 48 | 16 |
| SEQ ID NO: 74 | KIPKASSVPQELEPLPIVYY | 44 | 9 |
| SEQ ID NO: 75 | GIPEPSSVPQKMEPLPIVYY | 51 | 10 |
| SEQ ID NO: 76 | SIPKASSVPQELEPLPIVYY | 54 | 8 |
| SEQ ID NO: 77 | ASAAPSSVPQALEPLTILYY | 55 | 15 |
| SEQ ID NO: 78 | ASASPSSVSQDLEPLTILYY | 52 | 18 |
| SEQ ID NO: 79 | NDEGLESVPTEEEPLTILYY | 58 | 17 |
| SEQ ID NO: 80 | NDEGLESVPTEESSLSILFF | 27 | 9 |
| SEQ ID NO: 81 | RVPSTSSAPTKTSATSVLYY | 34 | 17 |
| SEQ ID NO: 82 | ASAAPSSAPTALSATSVLYY | 41 | 19 |
| SEQ ID NO: 83 | TVPKPSSAPTQLRSVKVAKV | 35 | 12 |
| SEQ ID NO: 84 | KVGKASSVPQKLEPLPIVYY | 33 | 9 |
| SEQ ID NO: 85 | KASKASSVPQKLEPLPIVYY | 22 | 10 |
| SEQ ID NO: 86 | RNVQSRPVPTQLSPISVLYK | 26 | 24 |
| SEQ ID NO: 87 | KIPKASSVPTELSPISVLYK | 32 | 21 |
| SEQ ID NO: 88 | ASAAPSSVPQALRSVKVAKV | 37 | 18 |
| SEQ ID NO: 89 | VSQDLRSVKVAKV | 36 | 17 |
| SEQ ID NO: 90 | ASASPSSVPQDLRSVKVAKV | 56 | 9 |
| SEQ ID NO: 91 | NDEGLESVPTEERSVKVAKV | 55 | 12 |
| SEQ ID NO: 92 | TQVKMRPVQVRKI | 44 | 8 |
| SEQ ID NO: 93 | KIPKASSTPTELSPINMLYF | 47 | 7 |
| SEQ ID NO: 94 | GIPEPSSTPTKMSPINMLYF | 39 | 9 |
| SEQ ID NO: 95 | VPTGQSAISMLYL | 52 | 17 |
| SEQ ID NO: 96 | NDEGLESVPTEESAISMLYL | 78 | 22 |
| SEQ ID NO: 97 | SSVKSQPSRVHHSPISILFI | 39 | 14 |
| SEQ ID NO: 98 | RNVQSRPTQVQLSPISILFI | 34 | 17 |
| SEQ ID NO: 99 | YVPKPSSAPTKLNAISVLYF | 66 | 21 |
| SEQ ID NO: 100 | HVPKPSSAPTKLEPISILYL | 75 | 19 |

### Example 15: RMSD Measurement and Recoding Activity

[1086] The data summarized in Table 5 below demonstrate that pharmaceutical associations according to certain embodiments of the present disclosure containing GFR-binding compounds as disclosed herein having a RMSD value of 2.45 Å or less, induce the particularly efficient recoding (as shown via quantification of pRB) of neoplastic cells (in this example: human osteosarcoma cells, MG63) into healthy cells:

TABLE 5

| | | RMSD | pRB |
|---|---|---|---|
| SEQ ID No | AA sequences | (Å) | (%) |
| SEQ ID NO: 64 | SIPKASSTPTELSPINMLYF | 0.73 | 23 |
| SEQ ID NO: 65 | TKPTSTPTKLSPINMLYF | 0.96 | 10 |
| SEQ ID NO: 66 | YVPKPSSTPTKLSPINMLYF | 0.77 | 8 |
| SEQ ID NO: 67 | ASAAPSSVPQALSSLSILFF | 0.81 | 15 |
| SEQ ID NO: 68 | ASASPSSVSQDLSSLSILFF | 0.79 | 14 |
| SEQ ID NO: 69 | VVPKPSSAPTQLEPISILYL | 0.72 | 20 |
| SEQ ID NO: 70 | AVPKASSAPTKLEPISILYL | 0.79 | 21 |
| SEQ ID NO: 71 | KVGKASSVPTKLEPISILYL | 0.79 | 17 |
| SEQ ID NO: 72 | SSVKSQPSRVHHKPLSMLYV | 0.71 | 19 |
| SEQ ID NO: 73 | RNVQSRPTQVQLKPLSMLYV | 0.79 | 16 |
| SEQ ID NO: 74 | KIPKASSVPQELEPLPIVYY | 0.84 | 9 |
| SEQ ID NO: 75 | GIPEPSSVPQKMEPLPIVYY | 0.85 | 10 |
| SEQ ID NO: 76 | SIPKASSVPQELEPLPIVYY | 0.82 | 8 |
| SEQ ID NO: 77 | ASAAPSSVPQALEPLTILYY | 0.87 | 15 |
| SEQ ID NO: 78 | ASASPSSVSQDLEPLTILYY | 0.91 | 18 |
| SEQ ID NO: 79 | NDEGLESVPTEEEPLTILYY | 0.83 | 17 |
| SEQ ID NO: 80 | NDEGLESVPTEESSLSILFF | 0.56 | 9 |
| SEQ ID NO: 81 | RVPSTSSAPTKTSATSVLYY | 0.87 | 17 |
| SEQ ID NO: 82 | ASAAPSSAPTALSATSVLYY | 0.84 | 19 |
| SEQ ID NO: 83 | TVPKPSSAPTQLRSVKVAKV | 1.11 | 12 |
| SEQ ID NO: 84 | KVGKASSVPQKLEPLPIVYY | 1.1 | 9 |
| SEQ ID NO: 85 | KASKASSVPQKLEPLPIVYY | 0.77 | 10 |
| SEQ ID NO: 86 | RNVQSRPVPTQLSPISVLYK | 1.42 | 24 |
| SEQ ID NO: 87 | KIPKASSVPTELSPISVLYK | 1.35 | 21 |
| SEQ ID NO: 88 | ASAAPSSVPQALRSVKVAKV | 1.27 | 18 |
| SEQ ID NO: 89 | VSQDLRSVKVAKV | 0.96 | 17 |
| SEQ ID NO: 90 | ASASPSSVPQDLRSVKVAKV | 1.42 | 9 |
| SEQ ID NO: 91 | NDEGLESVPTEERSVKVAKV | 1.45 | 12 |
| SEQ ID NO: 92 | TQVKMRPVQVRKI | 0.99 | 8 |
| SEQ ID NO: 93 | KIPKASSTPTELSPINMLYF | 1.13 | 7 |
| SEQ ID NO: 94 | GIPEPSSTPTKMSPINMLYF | 1.31 | 9 |
| SEQ ID NO: 95 | VPTGQSAISMLYL | 1.23 | 17 |
| SEQ ID NO: 96 | NDEGLESVPTEESAISMLYL | 0.96 | 22 |
| SEQ ID NO: 97 | SSVKSQPSRVHHSPISILFI | 0.79 | 14 |
| SEQ ID NO: 98 | RNVQSRPTQVQLSPISILFI | 0.79 | 17 |
| SEQ ID NO: 99 | YVPKPSSAPTKLNAISVLYF | 0.71 | 21 |
| SEQ ID NO: 100 | HVPKPSSAPTKLEPISILYL | 0.66 | 19 |

[1087] Likewise, using the method detailed in the description, the data summarized in Table 6 below demonstrate that pharmaceutical associations according to certain embodiments of the present disclosure containing GFR-binding peptides as disclosed herein in association with PET as already described herein:
[1088] for SEQ ID NO: 201 to 209, on MG63 cells;
[1089] for SEQ ID NO: 210 to 217, on human rhabdosarcoma cells;
[1090] for SEQ ID NO: 218 to 224, on mesenchymal chondrosarcoma cells; and
[1091] for SEQ ID NO: 225 to 238, on human adenocarcinoma cells;
   induce the particularly efficient recoding (as shown via quantification of pRB et P53) of neoplastic cells (in these examples: MG63 cells, human rhabdosarcoma cells, mesenchymal chondrosarcoma cells, and human adenocarcinoma cells, as stated above) into healthy cells. It should also be noted that GFR-binding peptides having a RMSD value of 2.45 Å or less, are particularly advantageous and efficient in recoding cells:

TABLE 6

| | | RMSD | P53 | pRB |
|---|---|---|---|---|
| SEQ ID No | AA sequences | (Å) | (%) | (%) |
| SEQ ID NO: 201 | NDEGLESVPEDLSSLSVLFF | 1.92 | 29 | 12 |
| SEQ ID NO: 202 | RVPSTSSVPTGQSAISTLYL | 1.78 | 25 | 10 |
| SEQ ID NO: 203 | RVPSTSSAPTKMNAISMLYF | 1.5 | 31 | 9 |
| SEQ ID NO: 204 | GIPEPSSAPTELSATSILYY | 1.66 | 33 | 16 |
| SEQ ID NO: 205 | STPPTSSVPTELSPISTLYK | 1.71 | 41 | 20 |
| SEQ ID NO: 206 | GIPEPSSAPVDLKPLSTLYV | 1.53 | 32 | 12 |
| SEQ ID NO: 207 | AASKASSVPQEEEPLPMVYY | 1.54 | 24 | 17 |
| SEQ ID NO: 208 | KIPKASSVSQKMEPLTMLYY | 1.7 | 30 | 12 |
| SEQ ID NO: 209 | KIPKASSVPTGGSNITVQIM | 1.43 | 45 | 11 |
| SEQ ID NO: 210 | AASKASSSRVELRSVKIAKV | 1.23 | 42 | 22 |
| SEQ ID NO: 211 | KIPKASSTQVRLRPVQIRKI | 1.87 | 42 | 19 |
| SEQ ID NO: 212 | STPPTSSSRVQLSAISMLYL | 1.44 | 27 | 11 |
| SEQ ID NO: 213 | RVPSTSSTQVKMSAISMLYL | 0.97 | 26 | 12 |
| SEQ ID NO: 214 | GIPEPSSVSQEESSLSTLFF | 0.88 | 31 | 18 |
| SEQ ID NO: 215 | KIPKASSSRVRLSSLSTLFF | 1.32 | 30 | 19 |
| SEQ ID NO: 216 | AASKASSTPTDLNAISTLYF | 1.66 | 27 | 19 |
| SEQ ID NO: 217 | RVPSTSSTQVDLNAISVLYF | 1.84 | 24 | 18 |
| SEQ ID NO: 218 | GIPEPSSVSQELSATSMLYY | 1.49 | 28 | 17 |
| SEQ ID NO: 219 | KIPKASSTQVGQSATSILYY | 1.93 | 31 | 14 |
| SEQ ID NO: 220 | STPPTSSAPVGQSPISMLYI | 1.83 | 34 | 15 |
| SEQ ID NO: 221 | KIPKASSTPTRLSPISMLFI | 1.45 | 37 | 21 |
| SEQ ID NO: 222 | GIPEPSSAPTRLEPISMLYL | 1.56 | 36 | 8 |
| SEQ ID NO: 223 | KIPKASSVSQQLEPISTLYL | 1.57 | 29 | 9 |
| SEQ ID NO: 224 | STPPTSSVPTEVSPINTLYF | 1.78 | 26 | 13 |
| SEQ ID NO: 225 | AASKASSSRVKMSPINVLYF | 1.75 | 25 | 12 |
| SEQ ID NO: 226 | KIPKASSVPTKMKPLSVLYV | 1.68 | 31 | 16 |
| SEQ ID NO: 227 | RVPSTSSAPTKMKPLSMLYV | 1.48 | 32 | 14 |
| SEQ ID NO: 228 | STPPTSSVSQKMKPLSILYV | 1.46 | 26 | 18 |
| SEQ ID NO: 229 | KIPKASSVPAQLEPLPIVYY | 1.71 | 31 | 23 |
| SEQ ID NO: 230 | GIPEPSSAPVGQEPLPMVYY | 1.74 | 30 | 19 |
| SEQ ID NO: 231 | RVPSTSSVPEKMEPLTMLYY | 1.8 | 22 | 18 |
| SEQ ID NO: 232 | GIPEPSSAPVEEEPLTTLYY | 1.75 | 21 | 13 |
| SEQ ID NO: 233 | STPPTSSTPTKMSNITTQIM | 1.97 | 43 | 23 |
| SEQ ID NO: 234 | RVPSTSSVPAEESNITVQIM | 1.92 | 45 | 22 |
| SEQ ID NO: 235 | AASKASSVPQRLRSVKVAKV | 2.01 | 40 | 26 |
| SEQ ID NO: 236 | KIPKASSTQVRLRSVKTAKV | 2.04 | 37 | 25 |
| SEQ ID NO: 237 | AASKASSVPEKMRPVQTRKI | 2.14 | 42 | 22 |
| SEQ ID NO: 238 | GIPEPSSAPVDMRPVQIRKI | 2.17 | 40 | 23 |

### Example 16: The Presence of Adhesion Components in the Extracellular Microenvironment Inhibits Cell Conversion

[1092] In order to demonstrate the importance of adhesion proteins inhibition in the recoding process of a neoplastic cell, a PET substrate was covalently functionalized with RGD peptides (the primary integrin recognition site present in many ECM proteins (e.g., fibronectin)) and an exemplary GFR-binding compound according to the present disclosure using methods already described herein.

[1093] This modified substrate was then cultured with human osteosarcoma cells from ATCC® in Dulbecco's Modified Eagle Medium (DMEM, Invitrogen®) supplemented with 10% (v/v) fetal bovine serum (FBS), 1% penicillin/streptomycin and incubated in a humidified atmosphere containing 5% (v/v) C02 at 37° C. All cell culture experiments were performed without any serum in the medium for the first 8 hours of culture. All cells were used at a low passage number (≤passage 10), were subconfluently cultured and were seeded at 10 000 cells/cm² for the purpose of the experiments. As shown in FIGS. 12A and 12B, the presence of covalently immobilized components favorising the adhesion inhibited the process of recoding of the osteosarcoma cells into osteocytes as characterized by RT-PCR and cell morphology observation.

[1094] It was also confirmed that the presence of RGD peptides did not modify the density of covently grafted GFR-binding compounds. Indeed, it was observed that the GFR-binding compound density was stable (around 1.3 pmol/mm²) with or without RGD peptides (FIG. 12C).

[1095] It was also shown that the RGD peptides interacted specifically with integrin α3β1. Indeed, inhibition of α3β1, α5β3 and αvβ3 integrins (i.e., the three predominant receptor dimers involved in binding ECM molecules containing RGD motifs for the osteosarcoma cells) by specific antibodies, indicated that cells predominantly engaged α3β1 integrins to interact with the RGD-modified substrate on the basis of the observed decrease of osteosarcoma cells adhesion in response to anti-α3β1 treatment (FIG. 12D). This was not observed when αvβ3 and a5p3 were blocked (FIG. 12E). For these antibody inhibition studies, cells were preincubated with 5 g/mL anti-α3β1 (clone JBS5), anti-αvβ1 (clone LM609) and anti-α5β3.

### Example 17: Integrin Engagement Inhibits Cell Conversion

[1096] Using the same setup as used in Example 16 (tumor cell and PET functionalized with RGD peptides and an exemplary GFR-binding compound), silencing of integrin α3 and integrin β1 expression using shRNA was shown to reduce integrin α3 and integrin β1 mRNA levels by 60-70% and 50-60% respectively and integrin α3 and integrin β1 proteins levels by 60-70% after 24 h. It was then shown that both integrins α3 and β1 shRNAs modulated osteosarcoma adhesion and spreading on RGD-modified substrates (FIG. 13 A, B).

[1097] Without being bound to any specific theory, integrin α3β1 thus appears to be an important factor in the conservation of osteosarcomas tumourous profile and appears to play an important role in the recoding of osteosarcomas into osteocytes. Herein, α3β1 integrin engagement appears to be involved in the inhibition of osteocytic recoding but not in osteosarcoma induction. Indeed, it was observed, within the framework of this experiment, that spheroid-like structures of osteosarcomas became progressively predominant (FIG. 13C). These results seems to demonstrate that integrin engagement has the ability to influence the behavior of human osteosarcoma towards spheroid-like structures or towards osteocytes.

### Example 18: In Vivo Rat Study

### A. Osteosarcoma Model

[1098] The OSRGa rat osteosarcoma orthotopic xenograft model in immunodeficient mice is the model of choice for the present study. This model is indeed characterized by the development of osteosarcoma tumors presenting very high similarities with the human osteosarcoma tumors both with regards to the tumor temporal development as well as its biological characteristics. Just like the human osteosarcoma, the OSRGa model is characterized by tumor proliferation associated with pulmonary metastasis and excessive bone remodeling. Indeed, OSRGa tumor cells, which multiply in contact with bone, produce bone matrix and induce an increase in mature and immature bone (woven bone) formation as well as a malignant osteolysis. In addition, similar to human osteosarcoma, the OSRGa tumors are comprised of tumor osteoblasts presenting marked cytonuclear abnormalities and high number of mitoses. This model is also highly reproducible and induces local orthotopic tumor formation with a very high incidence.

[1099] The OSRGa cell line isolated from osteosarcoma rat tumor is well characterized for both its in vitro phenotype and tumor development ability in vivo. When injected in contact with the mouse tibia periosteum, these cells induce de local development of osteosarcoma tumor associated with pulmonary metastasis providing a highly reproducible model most for preclinical animal studies.

### B. Experimental Protocol

### B.1. Orthotopic Xenograft Procedure

[1100] After 5 days of adaptation period, 3 to 4 weeks old female immunodeficient mice (Rj:NMRI-nude strain) were subjected to rat osteosarcoma OSRGa cells orthotopic xenograft. For establishing the osteosarcoma model, 2.10⁶ OSRGa cells as a 10 μL suspension were injected intramuscularly in contact with the right tibia of the nude mice, after scratching the periosteum. An analgesic administration was performed throughout the injection.

[1101] Osteosarcoma tumor development was observed in 100% of the OSRGa orthotopic xenografts of the present study. The tumor growth was assessed twice per week until a mean tumor volume of around 500 mm³ was reached 23 days after OSRGa cell injection. The mice were then randomly assigned to 8 different groups before compound administration.

### B.2. Compound Administration

[1102] 24 days after OSRGa cell injection, a 10⁻³M 1:1 mixture of GFR-binding peptides (SEQ ID NO: 240 and 239) covalently bound to a ceramic gel was injected inside the tumor. The injected volume of 90 μl was chosen according to the mean tumor volume for an efficient distribution. SEQ ID NO: SEQ ID NO: 240 and 239 were each grafted (via covalent binding of a N-terminal cysteine using a procedure already described herein) on a ceramic gel. The control conditions include a “No administration” condition for which no compound injections were performed in the tumor as well as a non grafted ceramic gel implant (Control 1). Hereinafter the various experimental conditions, the results for which are detailed below:

| | | Type of | Reference or |
|---|---|---|---|
| Experimental conditions | Code | product | test product |
| No administration | No administration | None | Reference |
| Ceramic gel | Control 1 | Gel | Reference |
| Ceramic gel grafted | Product | Gel | Test |
| with SEQ ID NO: | | | |
| SEQ ID NO: 240 and 239 | | | |

[1103] Two experimental endpoints were tested in the present study for the 3 experimental conditions: 3 days (1 injection) and 25 days (4 injections) after the first compound administration injection. The experimenters were blinded to group assignment until the completion of the procedure, and again at the time of the results assessment analysis performed with various techniques.

### B.3. Histopathological Analysis

[1104] For all the experimental conditions, the tumors were removed and paraffin embedded after which successive transverse sections were produced. A thorough histopathological analysis has been then performed on these sections in order to assess tissue and cellular structure and therefore tumor progression and tumor cell recoding with the following stainings:
[1105] Hematoxylin-Eosin (HE) staining to qualitatively analyze tissue morphology
[1106] Masson's Trichrome™ staining for distinguishing cells from surrounding connective tissue
[1107] Immunohistochemistry assays: E11 antigen, Sclerostin, DMP1, CD44

### C. Results

[1108] Osteosarcoma cell recoding was assessed by analysis of the cell transformation from tumor cell towards an osteocyte cell. The thorough histopathological analysis was carried out and permitted to determine a percentage of osteosarcoma cell recoding for the 3 experimental conditions and for the 2 endpoints of each condition via various parameters.

[1109] Regarding the first endpoint of the study (3 days, 1 injection), the following results have been obtained:

| | Recoding efficiency |
|---|---|
| Experimental conditions | (1 injection) |
| No administration | 1.2% |
| Ceramic gel | 1.7% |
| Ceramic gel grafted with SEQ ID NO: | 32% |
| SEQ ID NO: 240 and 239 | |

[1110] Regarding the second endpoint of the study (25 days, 4 injections), the following results have been obtained:

| | Recoding efficiency |
|---|---|
| Experimental conditions | (4 injections) |
| No administration | 0.8% |
| Ceramic gel | 2.6% |
| Ceramic gel grafted with SEQ ID NO: | 82% |
| SEQ ID NO: 240 and 239 | |

[1111] Almost no tumor osteosarcoma cell recoding towards osteocyte cells was observed for the two control conditions and for both of the experimental endpoints. Tumor cell progression was therefore not decreased. Tumor osteosarcoma cell recoding was observed for the test condition after 1 injection. It was particularly noted that efficiency of the cell recoding process was highly increased after 4 injections of the test condition.

### D. Conclusions

[1112] It was shown that efficient recoding of osteosarcoma cells in an osteosarcoma animal model presenting all of the characteristics of human osteosarcoma, was possible using representative GFR-binding compounds grafted covalently to a ceramic gel.

[1113] The pharmaceutical associations of the present disclosure have been shown to represent new therapeutic solutions for osteosarcoma with the unique ability to induce tumor cell transformation towards osteocytes, a healthy cell type, thereby blocking tumor progression and regenerating the affected tissue.

We claim:

1. A method for treating or preventing a neoplastic disease, disorder, condition, pathology, or any symptoms caused by said neoplastic disease, disorder, condition, or pathology, comprising administering, to a subject in need thereof, an effective amount of a pharmaceutical association, said association comprising at least one growth factor receptor-binding compound, which activates at least one growth factor receptor of a neoplastic cell, and at least one bioactive carrier forming at least one covalent or non-covalent interaction with said at least one growth factor receptor-binding compound,
wherein said association reduces or suppresses, in the neoplastic cell, the gene expression of at least one cyclin D and/or reduces or suppresses the formation of at least one complex formed between said at least one cyclin D and at least one of cyclin dependent-kinase 4 or 6;
wherein said growth factor receptor-binding compound comprises a peptide with four amino acids PEP1; and wherein PEP1 is selected from the group consisting of SAIS (SEQ ID NO: 13570), SSLS (SEQ ID NO: 13575), NAIS (SEQ ID NO: 13567), SATS (SEQ ID NO: 13571), SPIS (SEQ ID NO: 13574), EPIS (SEQ ID NO: 13563), SPIN (SEQ ID NO: 13573), KPLS (SEQ ID NO: 13566), EPLP (SEQ ID NO: 13564), EPLT (SEQ ID NO: 13565), SNIT (SEQ ID NO: 13572), RSVK (SEQ ID NO: 13569) and RPVQ (SEQ ID NO: 13568); and
wherein said growth factor receptor-binding compound is a peptide or a peptidomimetic; and wherein said bioactive carrier is a biomaterial.

2. The method according to claim 1, comprising a step selected from the group consisting of:
reducing or suppressing the gene expression of cyclin D during phase G1 of the cell cycle of the neoplastic cell;
restoring a function of at least one impaired cell cycle checkpoint;
down-regulating the expression or activity of a GTPase;
converting a neoplastic cell into a non-neoplastic cell;
inducing the differentiation of a neoplastic cell;
inducing the quiescence of a neoplastic cell;
inhibiting cell division of a neoplastic cell;
inhibiting cell proliferation of a neoplastic cell;
promoting anti-mitogen activity in a neoplastic cell;
promoting tumor suppressor activity in a neoplastic cell;
promoting anti-oncogenic activity in a neoplastic cell; and
any combinations thereof.

3. The method according to claim 1, wherein said growth factor-receptor-binding compound comprises a peptide with eight amino acids PEP12; wherein PEP12 is a peptide of general formula PEP1-AA¹⁷-PEP11; wherein AA¹⁷ is selected from the group consisting of G, A, V, L, I, P, F, M, W, T and S; wherein PEP11 is a peptide with 3 amino acids of general formula AA¹⁸-AA¹⁹-AA²⁰; wherein AA¹⁸ is selected from the group consisting of L, V, Q, A and R; wherein AA¹⁹ is selected from the group consisting of F, W, H, Y, I and K; wherein AA²⁰ is selected from the group consisting of L, F, Y, K, I, V and M.

4. The method according to claim 3, wherein PEP11 is selected from the group consisting of LYL, LFF, LYF, LYY, LYK, LYI, LFI, LYV, VYY, QIM, AKV and RKI.

5. The method according to claim 4, wherein the pair PEP1:PEP11 is selected from the group consisting of SAIS (SEQ ID NO: 13570):LYL, SSLS (SEQ ID NO: 13575):LFF, NAIS (SEQ ID NO: 13567):LYF, SATS (SEQ ID NO: 13571):LYY, SPIS (SEQ ID NO: 13574):LYK, SPIS (SEQ ID NO: 13574):LYI, SPIS (SEQ ID NO: 13574):LFI, EPIS (SEQ ID NO: 13563):LYL, SPIN (SEQ ID NO: 13573):LYF, KPLS (SEQ ID NO: 13566):LYV, EPLP (SEQ ID NO: 13564):VYY, EPLT (SEQ ID NO: 13565):LYY, SNIT (SEQ ID NO: 13572):QIM, RSVK (SEQ ID NO: 13569):AKV and RPVQ (SEQ ID NO: 13568):RKI.

6. The method according to claim 1, wherein said growth factor receptor-binding compound comprises at least one bioactive carrier-affinity-containing group, wherein said at least one bioactive carrier-affinity-containing group provides said growth factor receptor-binding compound with the ability to covalently or non-covalently interact with a bioactive carrier; wherein said bioactive carrier-affinity-containing group is a biomaterial affinity-containing group which forms at least one covalent bond or one non-covalent bond with a biomaterial.

7. The method according to claim 1, wherein said growth factor receptor-binding compound is a non-cyclic peptide with between 8 and 25 amino acids having growth factor receptor-binding capability or a non-cyclic peptidomimetic having growth factor receptor-binding capability, wherein said peptidomimetic has a molecular weight comprised between 600 and 4,000 Daltons and comprises between 8 and 25 amino acids.

8. The method according to claim 1, wherein the RMSD value of the structure coordinates of said peptide or peptidomimetic with respect to PEPREF is 2.45 Å (Angstroms) or less, and wherein PEPREF is

| | | | | | | | | |
|---|---|---|---|---|---|---|---|---|
| ATOM | 511 | N | LYS | A | 1 | −14.570 | 46.437 | 27.424 |
| ATOM | 512 | CA | LYS | A | 1 | −13.512 | 45.748 | 28.151 |
| ATOM | 513 | C | LYS | A | 1 | −13.655 | 44.259 | 27.884 |
| ATOM | 514 | O | LYS | A | 1 | −12.769 | 43.463 | 28.197 |
| ATOM | 515 | CB | LYS | A | 1 | −13.605 | 46.029 | 29.652 |
| ATOM | 516 | CG | LYS | A | 1 | −13.640 | 47.509 | 29.991 |
| ATOM | 517 | CD | LYS | A | 1 | −12.615 | 48.297 | 29.183 |
| ATOM | 518 | CE | LYS | A | 1 | −12.625 | 49.768 | 29.575 |
| ATOM | 519 | NZ | LYS | A | 1 | −13.994 | 50.369 | 29.497 |
| ATOM | 520 | N | ILE | A | 2 | −14.792 | 43.890 | 27.309 |
| ATOM | 521 | CA | ILE | A | 2 | −15.051 | 42.499 | 26.967 |
| ATOM | 522 | C | ILE | A | 2 | −14.911 | 42.370 | 25.444 |
| ATOM | 523 | O | ILE | A | 2 | −15.531 | 43.125 | 24.683 |
| ATOM | 524 | CB | ILE | A | 2 | −16.466 | 42.065 | 27.401 |
| ATOM | 525 | CG1 | ILE | A | 2 | −16.630 | 42.238 | 28.915 |
| ATOM | 526 | CG2 | ILE | A | 2 | −16.710 | 40.629 | 26.985 |
| ATOM | 527 | CD1 | ILE | A | 2 | −15.631 | 41.478 | 29.30 |
| ATOM | 528 | N | PRO | A | 3 | −14.085 | 41.411 | 24.989 |
| ATOM | 529 | CA | PRO | A | 3 | −13.789 | 41.109 | 23.588 |
| ATOM | 530 | C | PRO | A | 3 | −14.998 | 40.695 | 22.768 |
| ATOM | 531 | O | PRO | A | 3 | −15.969 | 40.164 | 23.305 |
| ATOM | 532 | CB | PRO | A | 3 | −12.785 | 39.968 | 23.688 |
| ATOM | 533 | CG | PRO | A | 3 | −12.156 | 40.166 | 25.007 |
| ATOM | 534 | CD | PRO | A | 3 | −13.330 | 40.506 | 25.867 |
| ATOM | 535 | N | LYS | A | 4 | −14.937 | 40.937 | 21.463 |
| ATOM | 536 | CA | LYS | A | 4 | −16.023 | 40.529 | 20.590 |
| ATOM | 537 | C | LYS | A | 4 | −15.886 | 39.015 | 20.391 |
| ATOM | 538 | O | LYS | A | 4 | −14.903 | 38.415 | 20.831 |
| ATOM | 539 | CB | LYS | A | 4 | −15.926 | 41.244 | 19.245 |
| ATOM | 540 | CG | LYS | A | 4 | −15.802 | 42.751 | 19.355 |
| ATOM | 541 | CD | LYS | A | 4 | −16.292 | 43.433 | 18.083 |
| ATOM | 542 | CE | LYS | A | 4 | −16.162 | 44.943 | 18.177 |
| ATOM | 543 | NZ | LYS | A | 4 | −16.825 | 45.628 | 17.019 |
| ATOM | 544 | N | ALA | A | 5 | −16.85 | 38.393 | 19.759 |
| ATOM | 545 | CA | ALA | A | 5 | −16.811 | 36.955 | 19.507 |
| ATOM | 546 | C | ALA | A | 5 | −15.772 | 36.771 | 18.416 |
| ATOM | 547 | O | ALA | A | 5 | −15.727 | 37.534 | 17.455 |
| ATOM | 548 | CB | ALA | A | 5 | −18.168 | 36.419 | 19.043 |
| ATOM | 549 | N | CYS | A | 6 | −14.935 | 35.756 | 18.562 |
| ATOM | 550 | CA | CYS | A | 6 | −13.887 | 35.518 | 17.584 |
| ATOM | 551 | C | CYS | A | 6 | −14.347 | 34.765 | 16.338 |
| ATOM | 552 | O | CYS | A | 6 | −15.327 | 34.018 | 16.368 |
| ATOM | 553 | CB | CYS | A | 6 | −12.743 | 34.768 | 18.241 |
| ATOM | 554 | SG | CYS | A | 6 | −11.198 | 34.959 | 17.353 |
| ATOM | 555 | N | CYS | A | 7 | −13.623 | 34.973 | 15.243 |
| ATOM | 556 | CA | CYS | A | 7 | −13.931 | 34.328 | 13.969 |
| ATOM | 557 | C | CYS | A | 7 | −13.091 | 33.071 | 13.798 |
| ATOM | 558 | O | CYS | A | 7 | −11.961 | 33.123 | 13.302 |
| ATOM | 559 | CB | CYS | A | 7 | −13.653 | 35.290 | 12.824 |
| ATOM | 560 | SG | CYS | A | 7 | −13.930 | 34.633 | 11.154 |
| ATOM | 561 | N | VAL | A | 8 | −13.654 | 31.941 | 14.209 |
| ATOM | 562 | CA | VAL | A | 8 | −12.949 | 30.684 | 14.110 |
| ATOM | 563 | C | VAL | A | 8 | −13.653 | 29.733 | 13.157 |
| ATOM | 564 | O | VAL | A | 8 | −14.759 | 30.016 | 12.687 |
| ATOM | 565 | CB | VAL | A | 8 | −12.814 | 30.038 | 15.492 |
| ATOM | 566 | CG1 | VAL | A | 8 | −11.807 | 30.825 | 16.337 |
| ATOM | 567 | CG2 | VAL | A | 8 | −14.161 | 30.006 | 16.170 |
| ATOM | 568 | N | PRO | A | 9 | −13.003 | 28.601 | 12.828 |
| ATOM | 569 | CA | PRO | A | 9 | −13.593 | 27.615 | 11.918 |
| ATOM | 570 | C | PRO | A | 9 | −14.726 | 26.886 | 12.631 |
| ATOM | 571 | O | PRO | A | 9 | −14.581 | 26.476 | 13.780 |
| ATOM | 572 | CB | PRO | A | 9 | −12.423 | 26.676 | 11.601 |
| ATOM | 573 | CG | PRO | A | 9 | −11.204 | 27.487 | 11.925 |
| ATOM | 574 | CD | PRO | A | 9 | −11.620 | 28.226 | 13.163 |
| ATOM | 575 | N | THR | A | 10 | −15.847 | 26.721 | 11.942 |
| ATOM | 576 | CA | THR | A | 10 | −16.999 | 26.060 | 12.527 |
| ATOM | 577 | C | THR | A | 10 | −17.334 | 24.767 | 11.804 |
| ATOM | 578 | O | THR | A | 10 | −18.097 | 23.943 | 12.303 |
| ATOM | 579 | CB | THR | A | 10 | −18.211 | 27.010 | 12.523 |
| ATOM | 580 | OG1 | THR | A | 10 | −18.491 | 27.445 | 11.185 |
| ATOM | 581 | CG2 | THR | A | 10 | −17.902 | 28.230 | 13.375 |
| ATOM | 582 | N | GLU | A | 11 | −16.750 | 24.586 | 10.627 |
| ATOM | 583 | CA | GLU | A | 11 | −16.980 | 23.377 | 9.848 |
| ATOM | 584 | C | GLU | A | 11 | −15.643 | 22.935 | 9.246 |
| ATOM | 585 | O | GLU | A | 11 | −15.029 | 23.666 | 8.464 |
| ATOM | 586 | CB | GLU | A | 11 | −17.981 | 23.624 | 8.715 |
| ATOM | 587 | CG | GLU | A | 11 | −19.421 | 23.807 | 9.163 |
| ATOM | 588 | CD | GLU | A | 11 | −19.686 | 25.166 | 9.770 |
| ATOM | 589 | OE1 | GLU | A | 11 | −19.478 | 26.175 | 9.073 |
| ATOM | 590 | OE2 | LEU | A | 11 | −20.111 | 25.227 | 10.939 |
| ATOM | 591 | N | LEU | A | 12 | −15.183 | 21.749 | 9.622 |
| ATOM | 592 | CA | LEU | A | 12 | −13.923 | 21.254 | 9.104 |
| ATOM | 593 | C | LEU | A | 12 | −14.062 | 19.912 | 8.386 |
| ATOM | 594 | O | LEU | A | 12 | −15.136 | 19.299 | 8.359 |
| ATOM | 595 | CB | LEU | A | 12 | −12.893 | 21.144 | 10.230 |
| ATOM | 596 | CG | LEU | A | 12 | −12.660 | 22.422 | 11.054 |
| ATOM | 597 | CD1 | LEU | A | 12 | −13.475 | 22.350 | 12.337 |
| ATOM | 598 | CD2 | LEU | A | 12 | −11.181 | 22.586 | 11.399 |
| ATOM | 599 | N | SER | A | 13 | −12.971 | 19.476 | 7.771 |
| ATOM | 600 | CA | SER | A | 13 | −12.964 | 18.218 | 7.046 |
| ATOM | 601 | C | SER | A | 13 | −11.568 | 17.628 | 7.164 |
| ATOM | 602 | O | SER | A | 13 | −10.613 | 18.320 | 7.550 |
| ATOM | 603 | CB | SER | A | 13 | −13.346 | 18.435 | 5.578 |
| ATOM | 604 | OG | SER | A | 13 | −12.404 | 19.261 | 4.923 |
| ATOM | 605 | N | ALA | A | 14 | −11.449 | 16.352 | 6.818 |
| ATOM | 606 | CA | ALA | A | 14 | −10.179 | 15.665 | 6.949 |
| ATOM | 607 | C | ALA | A | 14 | −9.421 | 15.471 | 5.652 |
| ATOM | 608 | O | ALA | A | 14 | −9.941 | 15.720 | 4.563 |
| ATOM | 609 | CB | ALA | A | 14 | −10.413 | 14.306 | 7.626 |
| ATOM | 610 | N | ILE | A | 15 | −8.171 | 15.046 | 5.783 |
| ATOM | 611 | CA | ILE | A | 15 | −7.343 | 14.746 | 4.623 |
| ATOM | 612 | C | ILE | A | 15 | −6.475 | 13.559 | 5.004 |
| ATOM | 613 | O | ILE | A | 15 | −6.212 | 13.316 | 6.183 |
| ATOM | 614 | CB | ILE | A | 15 | −6.401 | 15.916 | 4.183 |
| ATOM | 615 | CG1 | ILE | A | 15 | −5.284 | 16.106 | 5.200 |
| ATOM | 616 | CG2 | ILE | A | 15 | −7.188 | 17.211 | 3.982 |
| ATOM | 617 | CD1 | ILE | A | 15 | −4.173 | 16.973 | 4.696 |
| ATOM | 618 | N | SER | A | 16 | −6.045 | 12.806 | 3.999 |
| ATOM | 619 | CA | SER | A | 16 | −5.187 | 11.662 | 4.242 |
| ATOM | 620 | C | SER | A | 16 | −3.740 | 12.089 | 4.217 |
| ATOM | 621 | O | SER | A | 16 | −3.360 | 13.020 | 3.508 |
| ATOM | 622 | CB | SER | A | 16 | −5.416 | 10.584 | 3.185 |
| ATOM | 623 | OG | SER | A | 16 | −6.667 | 9.971 | 3.401 |
| ATOM | 624 | N | MET | A | 17 | −2.933 | 11.409 | 5.012 |
| ATOM | 625 | CA | MET | A | 17 | −1.518 | 11.700 | 5.047 |
| ATOM | 626 | C | MET | A | 17 | −0.778 | 10.414 | 5.244 |
| ATOM | 627 | O | MET | A | 17 | −1.137 | 9.594 | 6.078 |
| ATOM | 628 | CB | MET | A | 17 | −1.170 | 12.694 | 6.164 |
| ATOM | 629 | CG | MET | A | 17 | −1.848 | 14.042 | 5.974 |
| ATOM | 630 | SD | MET | A | 17 | −1.017 | 15.431 | 6.760 |
| ATOM | 631 | CE | MET | A | 17 | −0.799 | 14.823 | 8.475 |
| ATOM | 632 | N | LEU | A | 18 | 0.238 | 10.231 | 4.426 |
| ATOM | 633 | CA | LEU | A | 18 | 1.077 | 9.065 | 4.508 |
| ATOM | 634 | C | LEU | A | 18 | 2.289 | 9.610 | 5.264 |
| ATOM | 635 | O | LEU | A | 18 | 2.939 | 10.565 | 4.818 |
| ATOM | 636 | CB | LEU | A | 18 | 1.461 | 8.608 | 3.100 |
| ATOM | 637 | CG | LEU | A | 18 | 2.324 | 7.355 | 2.955 |
| ATOM | 638 | CD1 | LEU | A | 18 | 1.553 | 6.145 | 3.445 |
| ATOM | 639 | CD2 | LEU | A | 18 | 2.723 | 7.190 | 1.492 |
| ATOM | 640 | N | TYR | A | 19 | 2.581 | 9.029 | 6.418 |
| ATOM | 641 | CA | TYR | A | 19 | 3.706 | 9.501 | 7.196 |
| ATOM | 642 | C | TYR | A | 19 | 4.434 | 8.333 | 7.835 |
| ATOM | 643 | O | TYR | A | 19 | 4.081 | 7.186 | 7.603 |
| ATOM | 644 | CB | TYR | A | 19 | 3.222 | 10.458 | 8.281 |
| ATOM | 645 | CG | TYR | A | 19 | 2.386 | 9.782 | 9.346 |
| ATOM | 646 | CD1 | TYR | A | 19 | 1.029 | 9.527 | 9.147 |
| ATOM | 647 | CD2 | TYR | A | 19 | 2.961 | 9.379 | 10.550 |
| ATOM | 648 | CE1 | TYR | A | 19 | 0.273 | 8.894 | 10.128 |
| ATOM | 649 | CE2 | TYR | A | 19 | 2.218 | 8.745 | 11.526 |
| ATOM | 650 | CZ | TYR | A | 19 | 0.877 | 8.508 | 11.317 |
| ATOM | 651 | OH | TYR | A | 19 | 0.134 | 7.922 | 12.318 |
| ATOM | 652 | N | LEU | A | 20 | 5.439 | 8.651 | 8.650 |
| ATOM | 653 | CA | LEU | A | 20 | 6.255 | 7.661 | 9.347 |
| ATOM | 654 | C | LEU | A | 20 | 6.210 | 7.946 | 10.847 |
| ATOM | 655 | O | LEU | A | 20 | 6.685 | 8.992 | 11.288 |
| ATOM | 656 | CB | LEU | A | 20 | 7.701 | 7.763 | 8.871 |
| ATOM | 657 | CG | LEU | A | 20 | 7.901 | 7.850 | 7.359 |
| ATOM | 658 | CD1 | LEU | A | 20 | 9.300 | 8.379 | 7.039 |
| ATOM | 659 | CD2 | LEU | A | 20 | 7.669 | 6.482 | 6.748. |

9. The method according to claim 1, wherein said growth factor receptor-binding compound is a cyclic peptide with between 10 and 60 amino acids having a growth factor receptor-binding capability or a cyclic peptidomimetic comprising between 10 and 60 amino acids, having a growth factor receptor-binding capability.

10. The method according to claim 9, wherein said growth factor receptor-binding compound is a cyclic peptide or a cyclic peptidomimetic, having a molecular weight comprised between 1,000 and 7,000 Da.

11. The method according to claim 1, wherein said growth factor receptor-binding compound is selected from the group consisting of any one of peptides of SEQ ID NO: 1 to 13564.

12. The method according to claim 1, comprising at least one medically acceptable excipient, carrier or vehicle.

13. The method according to claim 1, wherein said method does not induce the death of said neoplastic cell.

14. A method of converting a neoplastic cell into a non-neoplastic cell, said method comprising the administration to a cell, in-vitro, ex-vivo or in-vivo, of an effective amount of a pharmaceutical association;
wherein said association comprising at least one growth factor receptor-binding compound, which activates at least one growth factor receptor of a neoplastic cell, and at least one bioactive carrier forming at least one covalent or non-covalent interaction with said at least one growth factor receptor-binding compound; and
wherein said association reduces or suppresses, in the neoplastic cell, the gene expression of at least one cyclin D and/or reduces or suppresses the formation of at least one complex formed between said at least one cyclin D and at least one of cyclin dependent-kinase 4 or 6.

15. A method of inducing the formation of a physiologically functional and healthy cell selected from the group consisting of the bone, cartilage, vascular, blood, fibroblast, muscle, neural, epithelial, renal, and retinal cell lineage from a neoplastic cell, comprising administering to a subject in need thereof an effective amount of a pharmaceutical association;
wherein said association comprising at least one growth factor receptor-binding compound, which activates at least one growth factor receptor of a neoplastic cell, and at least one bioactive carrier forming at least one covalent or non-covalent interaction with said at least one growth factor receptor-binding compound; and
wherein said association reduces or suppresses, in the neoplastic cell, the gene expression of at least one cyclin D and/or reduces or suppresses the formation of at least one complex formed between said at least one cyclin D and at least one of cyclin dependent-kinase 4 or 6.

16. A method of determining the effectiveness of a pharmaceutical association for converting a neoplastic cell into a non-neoplastic cell, or for treating a neoplastic disease or at least one symptom thereof, comprising:
the administration of said pharmaceutical association to a cell;
the measurement of the expression of specific differentiation and/or cancerous markers;
the comparison of the expression of said specific differentiation and/or cancerous markers in the cell to the expression of said specific differentiation and/or cancerous markers in a cell treated with a control; and
determining the effectiveness of the pharmaceutical association relative to the control;
wherein said association comprising at least one growth factor receptor-binding compound, which activates at least one growth factor receptor of a neoplastic cell, and at least one bioactive carrier forming at least one covalent or non-covalent interaction with said at least one growth factor receptor-binding compound; and
wherein said association reduces or suppresses, in the neoplastic cell, the gene expression of at least one cyclin D and/or reduces or suppresses the formation of at least one complex formed between said at least one cyclin D and at least one of cyclin dependent-kinase 4 or 6.

17. The method according to claim 1, wherein said biomaterial has a stiffness of at least 0.01 kPa and not more than 5 GPa.

18. The method according to claim 1, wherein said biomaterial is selected from the group consisting of metals and alloys, ceramics, polymeric biomaterials, and biocomposite materials.

19. The method according to claim 1, wherein said biomaterial is selected from the group consisting of (a) a biopolymer; (b) a synthetic polymer; (c) metals and metal oxides; (d) metallic glasses; (e) amorphous alloys; (f) porous metals; (g) gel or solid ceramics; (h) composites; (i) hydrogels; (j) demineralized bone matrix; and any combinations thereof.

20. The method according to claim 19, wherein
said biopolymer is selected from (a1) collagen and/or (a2) fibrin;
said synthetic polymer is selected from (b1) an ultra-high molecular weight polyethylene (UHMWPE), (b2) a polyurethane (PE), (b3) a polyurethane (PU), (b4) a polytetrafuoroethylene (PTFE), (b5) a polyacetal (PA), (b6) a polymethylmethacrylate (PMMA), (b7) a polyethylene terepthalate (PET), (b8) a silicone rubber (SR), (b9) polyetheretherketone (PEEK), (b10) a poly(lactic acid) (PLA), (b11) a polysulfone (PS), (b12) PLLA, (b13) PLGA and/or (b14) PLDA;
said metals and metal oxides are selected from (c1) gold and gold alloys, (c2) silver and silver alloys, (c3) platinum and platinum alloys, (c4) tantalum, (c5) Ti6Al4V, (c6) 316L stainless steel, (c7) Co—Cr Alloys, (c8) titanium alloys;
said amorphous alloys are Zr-based alloys;
said gel or solid ceramics are selected from (g1) alumina, (g2) zirconia, (g3) carbon, (g4) titania, (g5) bioglass, and/or (g6) hydroxyapatite (HA);
said composites are selected from (h1) silica/SR, (h2) CF/UHMWPE, (h3) CF/PTFE, (h4) HA/PE, (h5) CF/epoxy, (h6) CF/PEEK, (h7) CF/C and/or (h8) Al₂O₃/PTFE;
said hydrogels are selected from (i1) polyisocyanopeptide hydrogels, (i2) polysaccharides, (i3) polyglycols (i4) polyvinylpyrrolidone, (i5) poly(vinylalcohol), (i6) polyacrylic acids, (i7) glycerophosphates, (i8) 2-acrylamido-2-methylpropanesulfonic acid and/or (i9) and/or polyphosphazenes.

21. The method according to claim 20, wherein
said titanium alloys are selected from α-type, β-type, α+β-type Ti alloy and/or Ti—Nb alloys and
said polyisocyanopeptide hydrogels are oligo(ethylene)glycol polyisocyanopeptides,
said polysaccharides are selected from alginates, chitosans, chitins, guar gums, pectins, gellan gums, heparins, carrageenans, hyaluronans, starches, agars, xanthan gums, methylcellulose, carboxymethylcellulose and/or hydroxypropyl methyl cellulose and
said polyglycols are selected from polyethyleneglycol and/or polypropyleneglycol.

22. The method according to claim 21, wherein said Ti—Nb alloys are selected from Ti29Nb13Ta4.6Zr and/or Ti35Nb4Sn.

23. The method according to claim 1, wherein said biomaterial is selected from the group consisting of a solid ceramic component; a gel ceramic component; and collagen.

24. The method according to claim 23, wherein said solid ceramic component is a granulated ceramic powder or ceramic scaffolds and/or wherein said collagen is at least one of collagen type I, II, III and/or XI.

25. The method according to claim 1, wherein said growth factor receptor-binding compound comprises a peptide of any one of peptides of SEQ ID NO: 1 to 13564.

The application's sequence listing, which the Patent Office published only in electronic form, follows.

SEQUENCE LISTING (13897 sequences)

SEQ ID NO: 1 - protein, 20 aa, Artificial Sequence
  Non-cyclic GFR-binding peptide
RNVQSRPVPTQLSPISILYL

SEQ ID NO: 2 - protein, 20 aa, Artificial Sequence
  Non-cyclic GFR-binding peptide
YVPKPSSAPTKLNAISTLYF

SEQ ID NO: 3 - protein, 20 aa, Artificial Sequence
  Non-cyclic GFR-binding peptide
RVPSTSSVPTKTSAISMLYL

SEQ ID NO: 4 - protein, 20 aa, Artificial Sequence
  Non-cyclic GFR-binding peptide
HVPKPSSAPTKLEPISILYL

SEQ ID NO: 5 - protein, 20 aa, Artificial Sequence
  Non-cyclic GFR-binding peptide
HVTKPTSVPEKLSSLSILFF

SEQ ID NO: 6 - protein, 20 aa, Artificial Sequence
  Non-cyclic GFR-binding peptide
KVGKASSVSQKLEPLTILYY

SEQ ID NO: 7 - protein, 20 aa, Artificial Sequence
  Non-cyclic GFR-binding peptide
RNVQSRPTVPTLNAISVLYF

SEQ ID NO: 8 - protein, 20 aa, Artificial Sequence
  Non-cyclic GFR-binding peptide
HVPKPSSAPTKLSAISTLYL

SEQ ID NO: 9 - protein, 20 aa, Artificial Sequence
  Non-cyclic GFR-binding peptide
AVPKASSAPTKLSAISMLYL

SEQ ID NO: 10 - protein, 20 aa, Artificial Sequence
  Non-cyclic GFR-binding peptide
KVGKASSVPTKLSAISTLYL

SEQ ID NO: 11 - protein, 18 aa, Artificial Sequence
  Non-cyclic GFR-binding peptide
PKPSSAPTQLNAISMLYF

SEQ ID NO: 12 - protein, 20 aa, Artificial Sequence
  Non-cyclic GFR-binding peptide
KVPKASSVPTELSAISTLYL

SEQ ID NO: 13 - protein, 20 aa, Artificial Sequence
  Non-cyclic GFR-binding peptide
KVPKPSSAPTQLSAISTLYL

SEQ ID NO: 14 - protein, 20 aa, Artificial Sequence
  Non-cyclic GFR-binding peptide
KVGKASSVPTKLSAISTLYL

SEQ ID NO: 15 - protein, 20 aa, Artificial Sequence
  Non-cyclic GFR-binding peptide
TVPKPSSAPTQLSAISMLYL

SEQ ID NO: 16 - protein, 20 aa, Artificial Sequence
  Non-cyclic GFR-binding peptide
AVPKASSAPTKLSAISTLYL

SEQ ID NO: 17 - protein, 20 aa, Artificial Sequence
  Non-cyclic GFR-binding peptide
KVGKASSVPTKLSAISMLYL

SEQ ID NO: 18 - protein, 20 aa, Artificial Sequence
  Non-cyclic GFR-binding peptide
GGGKASSVPTKLSAISTLYL

SEQ ID NO: 19 - protein, 21 aa, Artificial Sequence
  Non-cyclic GFR-binding peptide
RKIPKAGGVPTELSAISTLYL

SEQ ID NO: 20 - protein, 20 aa, Artificial Sequence
  Non-cyclic GFR-binding peptide
SSVKSQPSRVHHKPLSMLYV

SEQ ID NO: 21 - protein, 21 aa, Artificial Sequence
  Non-cyclic GFR-binding peptide
RKIPKASSVPTELSAISMLYL

SEQ ID NO: 22 - protein, 20 aa, Artificial Sequence
  Non-cyclic GFR-binding peptide
RNVQSRPTQVQLKPLSMLYV

SEQ ID NO: 23 - protein, 20 aa, Artificial Sequence
  Non-cyclic GFR-binding peptide
KIPKASSVPQELEPLPIVYY

SEQ ID NO: 24 - protein, 20 aa, Artificial Sequence
  Non-cyclic GFR-binding peptide
AAPASSSVPARLSPISILYI

SEQ ID NO: 25 - protein, 20 aa, Artificial Sequence
  Non-cyclic GFR-binding peptide
GIPEPSSVPEKMSPISILYI

SEQ ID NO: 26 - protein, 20 aa, Artificial Sequence
  Non-cyclic GFR-binding peptide
AAPASSSVPARLSPISLLYI

SEQ ID NO: 27 - protein, 20 aa, Artificial Sequence
  Non-cyclic GFR-binding peptide
KVPKASSAPTKLEPLPMVYY

SEQ ID NO: 28 - protein, 20 aa, Artificial Sequence
  Non-cyclic GFR-binding peptide
KIPKASSVSQQLEPLTILYY

SEQ ID NO: 29 - protein, 20 aa, Artificial Sequence
  Non-cyclic GFR-binding peptide
KIPEPSSVPTKMEPLPTVYY

SEQ ID NO: 30 - protein, 20 aa, Artificial Sequence
  Non-cyclic GFR-binding peptide
KIPKASSVPTELEPLPIVYY

SEQ ID NO: 31 - protein, 20 aa, Artificial Sequence
  Non-cyclic GFR-binding peptide
KVGKASSVPTKLEPLTILYY

SEQ ID NO: 32 - protein, 20 aa, Artificial Sequence
  Non-cyclic GFR-binding peptide
KIPEPSSVPQKMEPLPIVYY

SEQ ID NO: 33 - protein, 20 aa, Artificial Sequence
  Non-cyclic GFR-binding peptide
KIPKASSVPTELEPLPIVYY

SEQ ID NO: 34 - protein, 20 aa, Artificial Sequence
  Non-cyclic GFR-binding peptide
ASAAPSSVPQALEPLPIVYY

SEQ ID NO: 35 - protein, 20 aa, Artificial Sequence
  Non-cyclic GFR-binding peptide
KIPKASSVPTELEPLPIVYY

SEQ ID NO: 36 - protein, 20 aa, Artificial Sequence
  Non-cyclic GFR-binding peptide
ASAAPSSVPTALEPLTILYY

SEQ ID NO: 37 - protein, 20 aa, Artificial Sequence
  Non-cyclic GFR-binding peptide
KIPKAAAVPTELEPLPIVYY

SEQ ID NO: 38 - protein, 20 aa, Artificial Sequence
  Non-cyclic GFR-binding peptide
ASAAPSSVPQALEPLPILYL

SEQ ID NO: 39 - protein, 20 aa, Artificial Sequence
  Non-cyclic GFR-binding peptide
KIPKASSVPTELEPLPILYF

SEQ ID NO: 40 - protein, 20 aa, Artificial Sequence
  Non-cyclic GFR-binding peptide
ASAAPSSVPQALEPLPILYK

SEQ ID NO: 41 - protein, 20 aa, Artificial Sequence
  Non-cyclic GFR-binding peptide
ASAAPSSVPQALRSVKVAKV

SEQ ID NO: 42 - protein, 20 aa, Artificial Sequence
  Non-cyclic GFR-binding peptide
AGGGLRVVSQDLRSMKTAKV

SEQ ID NO: 43 - protein, 20 aa, Artificial Sequence
  Non-cyclic GFR-binding peptide
ASAAPSSVPQALRPMQVRKI

SEQ ID NO: 44 - protein, 20 aa, Artificial Sequence
  Non-cyclic GFR-binding peptide
NDEGLESVPTEERSVKMAKV

SEQ ID NO: 45 - protein, 20 aa, Artificial Sequence
  Non-cyclic GFR-binding peptide
ASASPSSTQVDLRPTQVRKI

SEQ ID NO: 46 - protein, 18 aa, Artificial Sequence
  Non-cyclic GFR-binding peptide
GTPGPAPTKLSAISMLYL

SEQ ID NO: 47 - protein, 20 aa, Artificial Sequence
  Non-cyclic GFR-binding peptide
KVGKASSMPTKLNAISTLYF

SEQ ID NO: 48 - protein, 20 aa, Artificial Sequence
  Non-cyclic GFR-binding peptide
NDEGLESVPTEESNITMQIM

SEQ ID NO: 49 - protein, 20 aa, Artificial Sequence
  Non-cyclic GFR-binding peptide
TVPKPSSAPTQLSPISILYI

SEQ ID NO: 50 - protein, 20 aa, Artificial Sequence
  Non-cyclic GFR-binding peptide
ASASPSSVPQDLEPLTILYY

SEQ ID NO: 51 - protein, 22 aa, Artificial Sequence
  Non-cyclic GFR-binding peptide
GTPGPKASSVPTELSPISTLYK

SEQ ID NO: 52 - protein, 22 aa, Artificial Sequence
  Non-cyclic GFR-binding peptide
GTPGPKASSVPTELSPISTLYK

SEQ ID NO: 53 - protein, 23 aa, Artificial Sequence
  Non-cyclic GFR-binding peptide
GTPGPPKPSSAPTQLNAISMLYF

SEQ ID NO: 54 - protein, 22 aa, Artificial Sequence
  Non-cyclic GFR-binding peptide
WWFWGKASSVPTELSPISTLYK

SEQ ID NO: 55 - protein, 20 aa, Artificial Sequence
  Non-cyclic GFR-binding peptide
NDEGLESVPTEESNITMQIM

SEQ ID NO: 56 - protein, 8 aa, Artificial Sequence
  Non-cyclic GFR-binding peptide
SPINMLYF

SEQ ID NO: 57 - protein, 13 aa, Artificial Sequence
  Non-cyclic GFR-binding peptide
TPTKMSPINMLYF

SEQ ID NO: 58 - protein, 10 aa, Artificial Sequence
  Non-cyclic GFR-binding peptide
KLSAISTLYL

SEQ ID NO: 59 - protein, 10 aa, Artificial Sequence
  Non-cyclic GFR-binding peptide
KLSAISTLYL

SEQ ID NO: 60 - protein, 20 aa, Artificial Sequence
  Non-cyclic GFR-binding peptide
AVPKASSVPTKLSNITMQIM

SEQ ID NO: 61 - protein, 20 aa, Artificial Sequence
  Non-cyclic GFR-binding peptide
YVPKPSSAPTKLNAISMLYF

SEQ ID NO: 62 - protein, 20 aa, Artificial Sequence
  Non-cyclic GFR-binding peptide
KVPSTSSVPTKTSAISMLYL

SEQ ID NO: 63 - protein, 20 aa, Artificial Sequence
  Non-cyclic GFR-binding peptide
KVPKPSSAPTKLEPISMLYL

SEQ ID NO: 64 - protein, 20 aa, Artificial Sequence
  Non-cyclic GFR-binding peptide
SIPKASSTPTELSPINMLYF

SEQ ID NO: 65 - protein, 18 aa, Artificial Sequence
  Non-cyclic GFR-binding peptide
TKPTSTPTKLSPINMLYF

SEQ ID NO: 66 - protein, 20 aa, Artificial Sequence
  Non-cyclic GFR-binding peptide
YVPKPSSTPTKLSPINMLYF

SEQ ID NO: 67 - protein, 20 aa, Artificial Sequence
  Non-cyclic GFR-binding peptide
ASAAPSSVPQALSSLSILFF

SEQ ID NO: 68 - protein, 20 aa, Artificial Sequence
  Non-cyclic GFR-binding peptide
ASASPSSVSQDLSSLSILFF

SEQ ID NO: 69 - protein, 20 aa, Artificial Sequence
  Non-cyclic GFR-binding peptide
VVPKPSSAPTQLEPISILYL

SEQ ID NO: 70 - protein, 20 aa, Artificial Sequence
  Non-cyclic GFR-binding peptide
AVPKASSAPTKLEPISILYL

SEQ ID NO: 71 - protein, 20 aa, Artificial Sequence
  Non-cyclic GFR-binding peptide
KVGKASSVPTKLEPISILYL

SEQ ID NO: 72 - protein, 20 aa, Artificial Sequence
  Non-cyclic GFR-binding peptide
SSVKSQPSRVHHKPLSMLYV

SEQ ID NO: 73 - protein, 20 aa, Artificial Sequence
  Non-cyclic GFR-binding peptide
RNVQSRPTQVQLKPLSMLYV

SEQ ID NO: 74 - protein, 20 aa, Artificial Sequence
  Non-cyclic GFR-binding peptide
KIPKASSVPQELEPLPIVYY

SEQ ID NO: 75 - protein, 20 aa, Artificial Sequence
  Non-cyclic GFR-binding peptide
GIPEPSSVPQKMEPLPIVYY

SEQ ID NO: 76 - protein, 20 aa, Artificial Sequence
  Non-cyclic GFR-binding peptide
SIPKASSVPQELEPLPIVYY

SEQ ID NO: 77 - protein, 20 aa, Artificial Sequence
  Non-cyclic GFR-binding peptide
ASAAPSSVPQALEPLTILYY

SEQ ID NO: 78 - protein, 20 aa, Artificial Sequence
  Non-cyclic GFR-binding peptide
ASASPSSVSQDLEPLTILYY

SEQ ID NO: 79 - protein, 20 aa, Artificial Sequence
  Non-cyclic GFR-binding peptide
NDEGLESVPTEEEPLTILYY

SEQ ID NO: 80 - protein, 20 aa, Artificial Sequence
  Non-cyclic GFR-binding peptide
NDEGLESVPTEESSLSILFF

SEQ ID NO: 81 - protein, 20 aa, Artificial Sequence
  Non-cyclic GFR-binding peptide
RVPSTSSAPTKTSATSVLYY

SEQ ID NO: 82 - protein, 20 aa, Artificial Sequence
  Non-cyclic GFR-binding peptide
ASAAPSSAPTALSATSVLYY

SEQ ID NO: 83 - protein, 20 aa, Artificial Sequence
  Non-cyclic GFR-binding peptide
TVPKPSSAPTQLRSVKVAKV

SEQ ID NO: 84 - protein, 20 aa, Artificial Sequence
  Non-cyclic GFR-binding peptide
KVGKASSVPQKLEPLPIVYY

SEQ ID NO: 85 - protein, 20 aa, Artificial Sequence
  Non-cyclic GFR-binding peptide
KASKASSVPQKLEPLPIVYY

SEQ ID NO: 86 - protein, 20 aa, Artificial Sequence
  Non-cyclic GFR-binding peptide
RNVQSRPVPTQLSPISVLYK

SEQ ID NO: 87 - protein, 20 aa, Artificial Sequence
  Non-cyclic GFR-binding peptide
KIPKASSVPTELSPISVLYK

SEQ ID NO: 88 - protein, 20 aa, Artificial Sequence
  Non-cyclic GFR-binding peptide
ASAAPSSVPQALRSVKVAKV

SEQ ID NO: 89 - protein, 13 aa, Artificial Sequence
  Non-cyclic GFR-binding peptide
VSQDLRSVKVAKV

SEQ ID NO: 90 - protein, 20 aa, Artificial Sequence
  Non-cyclic GFR-binding peptide
ASASPSSVPQDLRSVKVAKV

SEQ ID NO: 91 - protein, 20 aa, Artificial Sequence
  Non-cyclic GFR-binding peptide
NDEGLESVPTEERSVKVAKV

SEQ ID NO: 92 - protein, 13 aa, Artificial Sequence
  Non-cyclic GFR-binding peptide
TQVKMRPVQVRKI

SEQ ID NO: 93 - protein, 20 aa, Artificial Sequence
  Non-cyclic GFR-binding peptide
KIPKASSTPTELSPINMLYF

SEQ ID NO: 94 - protein, 20 aa, Artificial Sequence
  Non-cyclic GFR-binding peptide
GIPEPSSTPTKMSPINMLYF

SEQ ID NO: 95 - protein, 13 aa, Artificial Sequence
  Non-cyclic GFR-binding peptide
VPTGQSAISMLYL

SEQ ID NO: 96 - protein, 20 aa, Artificial Sequence
  Non-cyclic GFR-binding peptide
NDEGLESVPTEESAISMLYL

SEQ ID NO: 97 - protein, 20 aa, Artificial Sequence
  Non-cyclic GFR-binding peptide
SSVKSQPSRVHHSPISILFI

SEQ ID NO: 98 - protein, 20 aa, Artificial Sequence
  Non-cyclic GFR-binding peptide
RNVQSRPTQVQLSPISILFI

SEQ ID NO: 99 - protein, 20 aa, Artificial Sequence
  Non-cyclic GFR-binding peptide
YVPKPSSAPTKLNAISVLYF

SEQ ID NO: 100 - protein, 20 aa, Artificial Sequence
  Non-cyclic GFR-binding peptide
HVPKPSSAPTKLEPISILYL

SEQ ID NO: 101 - protein, 20 aa, Artificial Sequence
  Non-cyclic GFR-binding peptide
LYLISIPSLQTPVPRSQVNR

SEQ ID NO: 102 - protein, 20 aa, Artificial Sequence
  Non-cyclic GFR-binding peptide
FYLTSIANLKTPASSPKPVY

SEQ ID NO: 103 - protein, 20 aa, Artificial Sequence
  Non-cyclic GFR-binding peptide
LYLMSIASTKTPVSSTSPVR

SEQ ID NO: 104 - protein, 20 aa, Artificial Sequence
  Non-cyclic GFR-binding peptide
LYLISIPELKTPASSPKPVH

SEQ ID NO: 105 - protein, 20 aa, Artificial Sequence
  Non-cyclic GFR-binding peptide
FFLISLSSLKEPVSTPKTVH

SEQ ID NO: 106 - protein, 20 aa, Artificial Sequence
  Non-cyclic GFR-binding peptide
YYLITLPELKQSVSSAKGVK

SEQ ID NO: 107 - protein, 20 aa, Artificial Sequence
  Non-cyclic GFR-binding peptide
FYLVSIANLTPVTPRSQVNR

SEQ ID NO: 108 - protein, 20 aa, Artificial Sequence
  Non-cyclic GFR-binding peptide
LYLTSIASLKTPASSPKPVH

SEQ ID NO: 109 - protein, 20 aa, Artificial Sequence
  Non-cyclic GFR-binding peptide
LYLMSIASLKTPASSAKPVA

SEQ ID NO: 110 - protein, 20 aa, Artificial Sequence
  Non-cyclic GFR-binding peptide
LYLTSIASLKTPVSSAKGVK

SEQ ID NO: 111 - protein, 18 aa, Artificial Sequence
  Non-cyclic GFR-binding peptide
FYLMSIANLQTPASSPKP

SEQ ID NO: 112 - protein, 20 aa, Artificial Sequence
  Non-cyclic GFR-binding peptide
LYLTSIASLETPVSSAKPVK

SEQ ID NO: 113 - protein, 20 aa, Artificial Sequence
  Non-cyclic GFR-binding peptide
LYLTSIASLQTPASSPKPVK

SEQ ID NO: 114 - protein, 20 aa, Artificial Sequence
  Non-cyclic GFR-binding peptide
LYLTSIASLKTPVSSAKGVK

SEQ ID NO: 115 - protein, 20 aa, Artificial Sequence
  Non-cyclic GFR-binding peptide
LYLMSIASLQTPASSPKPVT

SEQ ID NO: 116 - protein, 20 aa, Artificial Sequence
  Non-cyclic GFR-binding peptide
LYLTSIASLKTPASSAKPVA

SEQ ID NO: 117 - protein, 20 aa, Artificial Sequence
  Non-cyclic GFR-binding peptide
LYLMSIASLKTPVSSAKGVK

SEQ ID NO: 118 - protein, 20 aa, Artificial Sequence
  Non-cyclic GFR-binding peptide
LYLTSIASLKTPVSSAKGGG

SEQ ID NO: 119 - protein, 21 aa, Artificial Sequence
  Non-cyclic GFR-binding peptide
LYLTSIASLETPVGGAKPIKR

SEQ ID NO: 120 - protein, 20 aa, Artificial Sequence
  Non-cyclic GFR-binding peptide
VYLMSLPKHHVRSPQSKVSS

SEQ ID NO: 121 - protein, 21 aa, Artificial Sequence
  Non-cyclic GFR-binding peptide
LYLMSIASLETPVSSAKPIKR

SEQ ID NO: 122 - protein, 20 aa, Artificial Sequence
  Non-cyclic GFR-binding peptide
VYLMSLPKLQVQTPRSQVNR

SEQ ID NO: 123 - protein, 20 aa, Artificial Sequence
  Non-cyclic GFR-binding peptide
YYVIPLPELEQPVSSAKPIK

SEQ ID NO: 124 - protein, 20 aa, Artificial Sequence
  Non-cyclic GFR-binding peptide
IYLISIPSLRAPVSSSAPAA

SEQ ID NO: 125 - protein, 20 aa, Artificial Sequence
  Non-cyclic GFR-binding peptide
IYLISIPSMKEPVSSPEPIG

SEQ ID NO: 126 - protein, 20 aa, Artificial Sequence
  Non-cyclic GFR-binding peptide
IYLLSIPSLRAPVSSSAPAA

SEQ ID NO: 127 - protein, 20 aa, Artificial Sequence
  Non-cyclic GFR-binding peptide
YYVMPLPELKTPASSAKPVK

SEQ ID NO: 128 - protein, 20 aa, Artificial Sequence
  Non-cyclic GFR-binding peptide
YYLITLPELQQSVSSAKPIK

SEQ ID NO: 129 - protein, 20 aa, Artificial Sequence
  Non-cyclic GFR-binding peptide
YYVTPLPEMKTPVSSPEPIK

SEQ ID NO: 130 - protein, 20 aa, Artificial Sequence
  Non-cyclic GFR-binding peptide
YYVIPLPELETPVSSAKPIK

SEQ ID NO: 131 - protein, 20 aa, Artificial Sequence
  Non-cyclic GFR-binding peptide
YYLITLPELKTPVSSAKGVK

SEQ ID NO: 132 - protein, 20 aa, Artificial Sequence
  Non-cyclic GFR-binding peptide
YYVIPLPEMKQPVSSPEPIK

SEQ ID NO: 133 - protein, 20 aa, Artificial Sequence
  Non-cyclic GFR-binding peptide
YYVIPLPELETPVSSAKPIK

SEQ ID NO: 134 - protein, 20 aa, Artificial Sequence
  Non-cyclic GFR-binding peptide
YYVIPLPELAQPVSSPAASA

SEQ ID NO: 135 - protein, 20 aa, Artificial Sequence
  Non-cyclic GFR-binding peptide
YYVIPLPELETPVSSAKPIK

SEQ ID NO: 136 - protein, 20 aa, Artificial Sequence
  Non-cyclic GFR-binding peptide
YYLITLPELATPVSSPAASA

SEQ ID NO: 137 - protein, 20 aa, Artificial Sequence
  Non-cyclic GFR-binding peptide
YYVIPLPELETPVAAAKPIK

SEQ ID NO: 138 - protein, 20 aa, Artificial Sequence
  Non-cyclic GFR-binding peptide
LYLIPLPELAQPVSSPAASA

SEQ ID NO: 139 - protein, 20 aa, Artificial Sequence
  Non-cyclic GFR-binding peptide
FYLIPLPELETPVSSAKPIK

SEQ ID NO: 140 - protein, 20 aa, Artificial Sequence
  Non-cyclic GFR-binding peptide
KYLIPLPELAQPVSSPAASA

SEQ ID NO: 141 - protein, 20 aa, Artificial Sequence
  Non-cyclic GFR-binding peptide
VKAVKVSRLAQPVSSPAASA

SEQ ID NO: 142 - protein, 20 aa, Artificial Sequence
  Non-cyclic GFR-binding peptide
VKATKMSRLDQSVVRLGGGA

SEQ ID NO: 143 - protein, 20 aa, Artificial Sequence
  Non-cyclic GFR-binding peptide
IKRVQMPRLAQPVSSPAASA

SEQ ID NO: 144 - protein, 20 aa, Artificial Sequence
  Non-cyclic GFR-binding peptide
VKAMKVSREETPVSELGEDN

SEQ ID NO: 145 - protein, 20 aa, Artificial Sequence
  Non-cyclic GFR-binding peptide
IKRVQTPRLDVQTSSPSASA

SEQ ID NO: 146 - protein, 18 aa, Artificial Sequence
  Non-cyclic GFR-binding peptide
LYLMSIASLKTPAPGPTG

SEQ ID NO: 147 - protein, 20 aa, Artificial Sequence
  Non-cyclic GFR-binding peptide
FYLTSIANLKTPMSSAKGVK

SEQ ID NO: 148 - protein, 20 aa, Artificial Sequence
  Non-cyclic GFR-binding peptide
MIQMTINSEETPVSELGEDN

SEQ ID NO: 149 - protein, 20 aa, Artificial Sequence
  Non-cyclic GFR-binding peptide
IYLISIPSLQTPASSPKPVT

SEQ ID NO: 150 - protein, 20 aa, Artificial Sequence
  Non-cyclic GFR-binding peptide
YYLITLPELDQPVSSPSASA

SEQ ID NO: 151 - protein, 22 aa, Artificial Sequence
  Non-cyclic GFR-binding peptide
KYLTSIPSLETPVSSAKPGPTG

SEQ ID NO: 152 - protein, 22 aa, Artificial Sequence
  Non-cyclic GFR-binding peptide
KYLTSIPSLETPVSSAKPGPTG

SEQ ID NO: 153 - protein, 23 aa, Artificial Sequence
  Non-cyclic GFR-binding peptide
FYLMSIANLQTPASSPKPPGPTG

SEQ ID NO: 154 - protein, 22 aa, Artificial Sequence
  Non-cyclic GFR-binding peptide
KYLTSIPSLETPVSSAKGWFWW

SEQ ID NO: 155 - protein, 20 aa, Artificial Sequence
  Non-cyclic GFR-binding peptide
MIQMTINSEETPVSELGEDN

SEQ ID NO: 156 - protein, 8 aa, Artificial Sequence
  Non-cyclic GFR-binding peptide
FYLMNIPS

SEQ ID NO: 157 - protein, 13 aa, Artificial Sequence
  Non-cyclic GFR-binding peptide
FYLMNIPSMKTPT

SEQ ID NO: 158 - protein, 10 aa, Artificial Sequence
  Non-cyclic GFR-binding peptide
LYLTSIASLK

SEQ ID NO: 159 - protein, 10 aa, Artificial Sequence
  Non-cyclic GFR-binding peptide
LYLTSIASLK

SEQ ID NO: 160 - protein, 20 aa, Artificial Sequence
  Non-cyclic GFR-binding peptide
MIQMTINSLKTPVSSAKPVA

SEQ ID NO: 161 - protein, 20 aa, Artificial Sequence
  Non-cyclic GFR-binding peptide
FYLMSIANLKTPASSPKPVY

SEQ ID NO: 162 - protein, 20 aa, Artificial Sequence
  Non-cyclic GFR-binding peptide
LYLMSIASTKTPVSSTSPVK

SEQ ID NO: 163 - protein, 20 aa, Artificial Sequence
  Non-cyclic GFR-binding peptide
LYLMSIPELKTPASSPKPVK

SEQ ID NO: 164 - protein, 20 aa, Artificial Sequence
  Non-cyclic GFR-binding peptide
FYLMNIPSLETPTSSAKPIS

SEQ ID NO: 165 - protein, 18 aa, Artificial Sequence
  Non-cyclic GFR-binding peptide
FYLMNIPSLKTPTSTPKT

SEQ ID NO: 166 - protein, 20 aa, Artificial Sequence
  Non-cyclic GFR-binding peptide
FYLMNIPSLKTPTSSPKPVY

SEQ ID NO: 167 - protein, 20 aa, Artificial Sequence
  Non-cyclic GFR-binding peptide
FFLISLSSLAQPVSSPAASA

SEQ ID NO: 168 - protein, 20 aa, Artificial Sequence
  Non-cyclic GFR-binding peptide
FFLISLSSLDQSVSSPSASA

SEQ ID NO: 169 - protein, 20 aa, Artificial Sequence
  Non-cyclic GFR-binding peptide
LYLISIPELQTPASSPKPVV

SEQ ID NO: 170 - protein, 20 aa, Artificial Sequence
  Non-cyclic GFR-binding peptide
LYLISIPELKTPASSAKPVA

SEQ ID NO: 171 - protein, 20 aa, Artificial Sequence
  Non-cyclic GFR-binding peptide
LYLISIPELKTPVSSAKGVK

SEQ ID NO: 172 - protein, 20 aa, Artificial Sequence
  Non-cyclic GFR-binding peptide
VYLMSLPKHHVRSPQSKVSS

SEQ ID NO: 173 - protein, 20 aa, Artificial Sequence
  Non-cyclic GFR-binding peptide
VYLMSLPKLQVQTPRSQVNR

SEQ ID NO: 174 - protein, 20 aa, Artificial Sequence
  Non-cyclic GFR-binding peptide
YYVIPLPELEQPVSSAKPIK

SEQ ID NO: 175 - protein, 20 aa, Artificial Sequence
  Non-cyclic GFR-binding peptide
YYVIPLPEMKQPVSSPEPIG

SEQ ID NO: 176 - protein, 20 aa, Artificial Sequence
  Non-cyclic GFR-binding peptide
YYVIPLPELEQPVSSAKPIS

SEQ ID NO: 177 - protein, 20 aa, Artificial Sequence
  Non-cyclic GFR-binding peptide
YYLITLPELAQPVSSPAASA

SEQ ID NO: 178 - protein, 20 aa, Artificial Sequence
  Non-cyclic GFR-binding peptide
YYLITLPELDQSVSSPSASA

SEQ ID NO: 179 - protein, 20 aa, Artificial Sequence
  Non-cyclic GFR-binding peptide
YYLITLPEEETPVSELGEDN

SEQ ID NO: 180 - protein, 20 aa, Artificial Sequence
  Non-cyclic GFR-binding peptide
FFLISLSSEETPVSELGEDN

SEQ ID NO: 181 - protein, 20 aa, Artificial Sequence
  Non-cyclic GFR-binding peptide
YYLVSTASTKTPASSTSPVR

SEQ ID NO: 182 - protein, 20 aa, Artificial Sequence
  Non-cyclic GFR-binding peptide
YYLVSTASLATPASSPAASA

SEQ ID NO: 183 - protein, 20 aa, Artificial Sequence
  Non-cyclic GFR-binding peptide
VKAVKVSRLQTPASSPKPVT

SEQ ID NO: 184 - protein, 20 aa, Artificial Sequence
  Non-cyclic GFR-binding peptide
YYVIPLPELKQPVSSAKGVK

SEQ ID NO: 185 - protein, 20 aa, Artificial Sequence
  Non-cyclic GFR-binding peptide
YYVIPLPELKQPVSSAKSAK

SEQ ID NO: 186 - protein, 20 aa, Artificial Sequence
  Non-cyclic GFR-binding peptide
KYLVSIPSLQTPVPRSQVNR

SEQ ID NO: 187 - protein, 20 aa, Artificial Sequence
  Non-cyclic GFR-binding peptide
KYLVSIPSLETPVSSAKPIK

SEQ ID NO: 188 - protein, 20 aa, Artificial Sequence
  Non-cyclic GFR-binding peptide
VKAVKVSRLAQPVSSPAASA

SEQ ID NO: 189 - protein, 13 aa, Artificial Sequence
  Non-cyclic GFR-binding peptide
VKAVKVSRLDQSV

SEQ ID NO: 190 - protein, 20 aa, Artificial Sequence
  Non-cyclic GFR-binding peptide
VKAVKVSRLDQPVSSPSASA

SEQ ID NO: 191 - protein, 20 aa, Artificial Sequence
  Non-cyclic GFR-binding peptide
VKAVKVSREETPVSELGEDN

SEQ ID NO: 192 - protein, 13 aa, Artificial Sequence
  Non-cyclic GFR-binding peptide
IKRVQVPRMKVQT

SEQ ID NO: 193 - protein, 20 aa, Artificial Sequence
  Non-cyclic GFR-binding peptide
FYLMNIPSLETPTSSAKPIK

SEQ ID NO: 194 - protein, 20 aa, Artificial Sequence
  Non-cyclic GFR-binding peptide
FYLMNIPSMKTPTSSPEPIG

SEQ ID NO: 195 - protein, 13 aa, Artificial Sequence
  Non-cyclic GFR-binding peptide
LYLMSIASQGTPV

SEQ ID NO: 196 - protein, 20 aa, Artificial Sequence
  Non-cyclic GFR-binding peptide
LYLMSIASEETPVSELGEDN

SEQ ID NO: 197 - protein, 20 aa, Artificial Sequence
  Non-cyclic GFR-binding peptide
IFLISIPSHHVRSPQSKVSS

SEQ ID NO: 198 - protein, 20 aa, Artificial Sequence
  Non-cyclic GFR-binding peptide
IFLISIPSLQVQTPRSQVNR

SEQ ID NO: 199 - protein, 20 aa, Artificial Sequence
  Non-cyclic GFR-binding peptide
FYLVSIANLKTPASSPKPVY

SEQ ID NO: 200 - protein, 20 aa, Artificial Sequence
  Non-cyclic GFR-binding peptide
LYLISIPELKTPASSPKPVH

SEQ ID NO: 201 - protein, 20 aa, Artificial Sequence
  Non-cyclic GFR-binding peptide
NDEGLESVPEDLSSLSVLFF

SEQ ID NO: 202 - protein, 20 aa, Artificial Sequence
  Non-cyclic GFR-binding peptide
RVPSTSSVPTGQSAISTLYL

SEQ ID NO: 203 - protein, 20 aa, Artificial Sequence
  Non-cyclic GFR-binding peptide
RVPSTSSAPTKMNAISMLYF

SEQ ID NO: 204 - protein, 20 aa, Artificial Sequence
  Non-cyclic GFR-binding peptide
GIPEPSSAPTELSATSILYY

SEQ ID NO: 205 - protein, 20 aa, Artificial Sequence
  Non-cyclic GFR-binding peptide
STPPTSSVPTELSPISTLYK

SEQ ID NO: 206 - protein, 20 aa, Artificial Sequence
  Non-cyclic GFR-binding peptide
GIPEPSSAPVDLKPLSTLYV

SEQ ID NO: 207 - protein, 20 aa, Artificial Sequence
  Non-cyclic GFR-binding peptide
AASKASSVPQEEEPLPMVYY

SEQ ID NO: 208 - protein, 20 aa, Artificial Sequence
  Non-cyclic GFR-binding peptide
KIPKASSVSQKMEPLTMLYY

SEQ ID NO: 209 - protein, 20 aa, Artificial Sequence
  Non-cyclic GFR-binding peptide
KIPKASSVPTGGSNITVQIM

SEQ ID NO: 210 - protein, 20 aa, Artificial Sequence
  Non-cyclic GFR-binding peptide
AASKASSSRVELRSVKIAKV

SEQ ID NO: 211 - protein, 20 aa, Artificial Sequence
  Non-cyclic GFR-binding peptide
KIPKASSTQVRLRPVQIRKI

SEQ ID NO: 212 - protein, 20 aa, Artificial Sequence
  Non-cyclic GFR-binding peptide
STPPTSSSRVQLSAISMLYL

SEQ ID NO: 213 - protein, 20 aa, Artificial Sequence
  Non-cyclic GFR-binding peptide
RVPSTSSTQVKMSAISMLYL

SEQ ID NO: 214 - protein, 20 aa, Artificial Sequence
  Non-cyclic GFR-binding peptide
GIPEPSSVSQEESSLSTLFF

SEQ ID NO: 215 - protein, 20 aa, Artificial Sequence
  Non-cyclic GFR-binding peptide
KIPKASSSRVRLSSLSTLFF

SEQ ID NO: 216 - protein, 20 aa, Artificial Sequence
  Non-cyclic GFR-binding peptide
AASKASSTPTDLNAISTLYF

SEQ ID NO: 217 - protein, 20 aa, Artificial Sequence
  Non-cyclic GFR-binding peptide
RVPSTSSTQVDLNAISVLYF

SEQ ID NO: 218 - protein, 20 aa, Artificial Sequence
  Non-cyclic GFR-binding peptide
GIPEPSSVSQELSATSMLYY

SEQ ID NO: 219 - protein, 20 aa, Artificial Sequence
  Non-cyclic GFR-binding peptide
KIPKASSTQVGQSATSILYY

SEQ ID NO: 220 - protein, 20 aa, Artificial Sequence
  Non-cyclic GFR-binding peptide
STPPTSSAPVGQSPISMLYI

SEQ ID NO: 221 - protein, 20 aa, Artificial Sequence
  Non-cyclic GFR-binding peptide
KIPKASSTPTRLSPISMLFI

SEQ ID NO: 222 - protein, 20 aa, Artificial Sequence
  Non-cyclic GFR-binding peptide
GIPEPSSAPTRLEPISMLYL

SEQ ID NO: 223 - protein, 20 aa, Artificial Sequence
  Non-cyclic GFR-binding peptide
KIPKASSVSQQLEPISTLYL

SEQ ID NO: 224 - protein, 20 aa, Artificial Sequence
  Non-cyclic GFR-binding peptide
STPPTSSVPTEVSPINTLYF

SEQ ID NO: 225 - protein, 20 aa, Artificial Sequence
  Non-cyclic GFR-binding peptide
AASKASSSRVKMSPINVLYF

SEQ ID NO: 226 - protein, 20 aa, Artificial Sequence
  Non-cyclic GFR-binding peptide
KIPKASSVPTKMKPLSVLYV

SEQ ID NO: 227 - protein, 20 aa, Artificial Sequence
  Non-cyclic GFR-binding peptide
RVPSTSSAPTKMKPLSMLYV

SEQ ID NO: 228 - protein, 20 aa, Artificial Sequence
  Non-cyclic GFR-binding peptide
STPPTSSVSQKMKPLSILYV

SEQ ID NO: 229 - protein, 20 aa, Artificial Sequence
  Non-cyclic GFR-binding peptide
KIPKASSVPAQLEPLPIVYY

SEQ ID NO: 230 - protein, 20 aa, Artificial Sequence
  Non-cyclic GFR-binding peptide
GIPEPSSAPVGQEPLPMVYY

SEQ ID NO: 231 - protein, 20 aa, Artificial Sequence
  Non-cyclic GFR-binding peptide
RVPSTSSVPEKMEPLTMLYY

SEQ ID NO: 232 - protein, 20 aa, Artificial Sequence
  Non-cyclic GFR-binding peptide
GIPEPSSAPVEEEPLTTLYY

SEQ ID NO: 233 - protein, 20 aa, Artificial Sequence
  Non-cyclic GFR-binding peptide
STPPTSSTPTKMSNITTQIM

SEQ ID NO: 234 - protein, 20 aa, Artificial Sequence
  Non-cyclic GFR-binding peptide
RVPSTSSVPAEESNITVQIM

SEQ ID NO: 235 - protein, 20 aa, Artificial Sequence
  Non-cyclic GFR-binding peptide
AASKASSVPQRLRSVKVAKV

SEQ ID NO: 236 - protein, 20 aa, Artificial Sequence
  Non-cyclic GFR-binding peptide
KIPKASSTQVRLRSVKTAKV

SEQ ID NO: 237 - protein, 20 aa, Artificial Sequence
  Non-cyclic GFR-binding peptide
AASKASSVPEKMRPVQTRKI

SEQ ID NO: 238 - protein, 20 aa, Artificial Sequence
  Non-cyclic GFR-binding peptide
GIPEPSSAPVDMRPVQIRKI

SEQ ID NO: 239 - protein, 20 aa, Artificial Sequence
  Non-cyclic GFR-binding peptide
GVPKPSSVPTKLSAISTLYL

SEQ ID NO: 240 - protein, 20 aa, Artificial Sequence
  Non-cyclic GFR-binding peptide
CSAAPSSVPTALSAISMLYL

SEQ ID NO: 241 - protein, 20 aa, Artificial Sequence
  Non-cyclic GFR-binding peptide
GIPEPSSVPTKMSAISMLYL

SEQ ID NO: 242 - protein, 20 aa, Artificial Sequence
  Non-cyclic GFR-binding peptide
HVTKPTSVPTKLSAISMLYL

SEQ ID NO: 243 - protein, 20 aa, Artificial Sequence
  Non-cyclic GFR-binding peptide
YVPKPSSVPTKLSAISMLYL

SEQ ID NO: 244 - protein, 20 aa, Artificial Sequence
  Non-cyclic GFR-binding peptide
TVPKPSSVPTQLSAISMLYL

SEQ ID NO: 245 - protein, 20 aa, Artificial Sequence
  Non-cyclic GFR-binding peptide
AVPKASSVPTKLSAISMLYL

SEQ ID NO: 246 - protein, 20 aa, Artificial Sequence
  Non-cyclic GFR-binding peptide
KASKASSVPTKLSAISMLYL

SEQ ID NO: 247 - protein, 20 aa, Artificial Sequence
  Non-cyclic GFR-binding peptide
HVPKPSSVPTKLSAISMLYL

SEQ ID NO: 248 - protein, 20 aa, Artificial Sequence
  Non-cyclic GFR-binding peptide
ASAAPSSVPTALSAISMLYL

SEQ ID NO: 249 - protein, 20 aa, Artificial Sequence
  Non-cyclic GFR-binding peptide
ASASPSSVPTDLSAISMLYL

SEQ ID NO: 250 - protein, 20 aa, Artificial Sequence
  Non-cyclic GFR-binding peptide
GIPEPSSVPEKMSAISMLYL

SEQ ID NO: 251 - protein, 20 aa, Artificial Sequence
  Non-cyclic GFR-binding peptide
HVTKPTSAPTKLSAISMLYL

SEQ ID NO: 252 - protein, 20 aa, Artificial Sequence
  Non-cyclic GFR-binding peptide
YVPKPSSAPTKLSAISMLYL

SEQ ID NO: 253 - protein, 20 aa, Artificial Sequence
  Non-cyclic GFR-binding peptide
GSAGPSSTPTKMSAISMLYL

SEQ ID NO: 254 - protein, 20 aa, Artificial Sequence
  Non-cyclic GFR-binding peptide
AAPASSSVPARLSAISMLYL

SEQ ID NO: 255 - protein, 20 aa, Artificial Sequence
  Non-cyclic GFR-binding peptide
RVPSTSSAPVKTSAISMLYL

SEQ ID NO: 256 - protein, 20 aa, Artificial Sequence
  Non-cyclic GFR-binding peptide
ASAAPSSVPQALSAISMLYL

SEQ ID NO: 257 - protein, 20 aa, Artificial Sequence
  Non-cyclic GFR-binding peptide
ASASPSSVPQDLSAISMLYL

SEQ ID NO: 258 - protein, 20 aa, Artificial Sequence
  Non-cyclic GFR-binding peptide
SSVKSQPSRVHHSAISMLYL

SEQ ID NO: 259 - protein, 20 aa, Artificial Sequence
  Non-cyclic GFR-binding peptide
KIPKASSVPEELSSLSILFF

SEQ ID NO: 260 - protein, 20 aa, Artificial Sequence
  Non-cyclic GFR-binding peptide
SIPKASSVPEELSSLSILFF

SEQ ID NO: 261 - protein, 20 aa, Artificial Sequence
  Non-cyclic GFR-binding peptide
YVPKPSSVPEKLSSLSILFF

SEQ ID NO: 262 - protein, 20 aa, Artificial Sequence
  Non-cyclic GFR-binding peptide
TVPKPSSVPEQLSSLSILFF

SEQ ID NO: 263 - protein, 20 aa, Artificial Sequence
  Non-cyclic GFR-binding peptide
AVPKASSVPEKLSSLSILFF

SEQ ID NO: 264 - protein, 20 aa, Artificial Sequence
  Non-cyclic GFR-binding peptide
KVGKASSVPEKLSSLSILFF

SEQ ID NO: 265 - protein, 20 aa, Artificial Sequence
  Non-cyclic GFR-binding peptide
KASKASSVPEKLSSLSILFF

SEQ ID NO: 266 - protein, 20 aa, Artificial Sequence
  Non-cyclic GFR-binding peptide
AAPASSSVPERLSSLSILFF

SEQ ID NO: 267 - protein, 20 aa, Artificial Sequence
  Non-cyclic GFR-binding peptide
STPPTSSVPERLSSLSILFF

SEQ ID NO: 268 - protein, 20 aa, Artificial Sequence
  Non-cyclic GFR-binding peptide
HVPKPSSVPEKLSSLSILFF

SEQ ID NO: 269 - protein, 20 aa, Artificial Sequence
  Non-cyclic GFR-binding peptide
RVPSTSSVPEKTSSLSILFF

SEQ ID NO: 270 - protein, 20 aa, Artificial Sequence
  Non-cyclic GFR-binding peptide
ASAAPSSVPEALSSLSILFF

SEQ ID NO: 271 - protein, 20 aa, Artificial Sequence
  Non-cyclic GFR-binding peptide
ASASPSSVPEDLSSLSILFF

SEQ ID NO: 272 - protein, 20 aa, Artificial Sequence
  Non-cyclic GFR-binding peptide
KIPKASSVPTELSSLSILFF

SEQ ID NO: 273 - protein, 20 aa, Artificial Sequence
  Non-cyclic GFR-binding peptide
SIPKASSVPTELSSLSILFF

SEQ ID NO: 274 - protein, 20 aa, Artificial Sequence
  Non-cyclic GFR-binding peptide
HVTKPTSAPTKLSSLSILFF

SEQ ID NO: 275 - protein, 20 aa, Artificial Sequence
  Non-cyclic GFR-binding peptide
YVPKPSSAPTKLSSLSILFF

SEQ ID NO: 276 - protein, 20 aa, Artificial Sequence
  Non-cyclic GFR-binding peptide
TVPKPSSAPTQLSSLSILFF

SEQ ID NO: 277 - protein, 20 aa, Artificial Sequence
  Non-cyclic GFR-binding peptide
AVPKASSAPTKLSSLSILFF

SEQ ID NO: 278 - protein, 20 aa, Artificial Sequence
  Non-cyclic GFR-binding peptide
KVGKASSVPTKLSSLSILFF

SEQ ID NO: 279 - protein, 20 aa, Artificial Sequence
  Non-cyclic GFR-binding peptide
KASKASSVPTKLSSLSILFF

SEQ ID NO: 280 - protein, 20 aa, Artificial Sequence
  Non-cyclic GFR-binding peptide
GSAGPSSTPTKMSSLSILFF

SEQ ID NO: 281 - protein, 20 aa, Artificial Sequence
  Non-cyclic GFR-binding peptide
AAPASSSVPARLSSLSILFF

SEQ ID NO: 282 - protein, 20 aa, Artificial Sequence
  Non-cyclic GFR-binding peptide
STPPTSSVPTRLSSLSILFF

SEQ ID NO: 283 - protein, 20 aa, Artificial Sequence
  Non-cyclic GFR-binding peptide
HVPKPSSAPTKLSSLSILFF

SEQ ID NO: 284 - protein, 20 aa, Artificial Sequence
  Non-cyclic GFR-binding peptide
RVPSTSSAPVKTSSLSILFF

SEQ ID NO: 285 - protein, 20 aa, Artificial Sequence
  Non-cyclic GFR-binding peptide
ASASPSSVPQDLSSLSILFF

SEQ ID NO: 286 - protein, 20 aa, Artificial Sequence
  Non-cyclic GFR-binding peptide
NDEGLESVPTGQSSLSILFF

SEQ ID NO: 287 - protein, 20 aa, Artificial Sequence
  Non-cyclic GFR-binding peptide
SSVKSQPSRVHHSSLSILFF

SEQ ID NO: 288 - protein, 20 aa, Artificial Sequence
  Non-cyclic GFR-binding peptide
RNVQSRPTQVQLSSLSILFF

SEQ ID NO: 289 - protein, 20 aa, Artificial Sequence
  Non-cyclic GFR-binding peptide
KIPKASSAPTELNAISVLYF

SEQ ID NO: 290 - protein, 20 aa, Artificial Sequence
  Non-cyclic GFR-binding peptide
GIPEPSSAPTKMNAISVLYF

SEQ ID NO: 291 - protein, 20 aa, Artificial Sequence
  Non-cyclic GFR-binding peptide
SIPKASSAPTELNAISVLYF

SEQ ID NO: 292 - protein, 20 aa, Artificial Sequence
  Non-cyclic GFR-binding peptide
AVPKASSAPTKLNAISVLYF

SEQ ID NO: 293 - protein, 20 aa, Artificial Sequence
  Non-cyclic GFR-binding peptide
KVGKASSAPTKLNAISVLYF

SEQ ID NO: 294 - protein, 20 aa, Artificial Sequence
  Non-cyclic GFR-binding peptide
KASKASSAPTKLNAISVLYF

SEQ ID NO: 295 - protein, 20 aa, Artificial Sequence
  Non-cyclic GFR-binding peptide
GSAGPSSAPTKMNAISVLYF

SEQ ID NO: 296 - protein, 20 aa, Artificial Sequence
  Non-cyclic GFR-binding peptide
AAPASSSAPTRLNAISVLYF

SEQ ID NO: 297 - protein, 20 aa, Artificial Sequence
  Non-cyclic GFR-binding peptide
STPPTSSAPTRLNAISVLYF

SEQ ID NO: 298 - protein, 20 aa, Artificial Sequence
  Non-cyclic GFR-binding peptide
RVPSTSSAPTKTNAISVLYF

SEQ ID NO: 299 - protein, 20 aa, Artificial Sequence
  Non-cyclic GFR-binding peptide
ASAAPSSAPTALNAISVLYF

SEQ ID NO: 300 - protein, 20 aa, Artificial Sequence
  Non-cyclic GFR-binding peptide
ASASPSSAPTDLNAISVLYF

SEQ ID NO: 301 - protein, 20 aa, Artificial Sequence
  Non-cyclic GFR-binding peptide
KIPKASSVPTELNAISVLYF

SEQ ID NO: 302 - protein, 20 aa, Artificial Sequence
  Non-cyclic GFR-binding peptide
GIPEPSSVPEKMNAISVLYF

SEQ ID NO: 303 - protein, 20 aa, Artificial Sequence
  Non-cyclic GFR-binding peptide
SIPKASSVPTELNAISVLYF

SEQ ID NO: 304 - protein, 20 aa, Artificial Sequence
  Non-cyclic GFR-binding peptide
KVGKASSVPTKLNAISVLYF

SEQ ID NO: 305 - protein, 20 aa, Artificial Sequence
  Non-cyclic GFR-binding peptide
KASKASSVPTKLNAISVLYF

SEQ ID NO: 306 - protein, 20 aa, Artificial Sequence
  Non-cyclic GFR-binding peptide
GSAGPSSTPTKMNAISVLYF

SEQ ID NO: 307 - protein, 20 aa, Artificial Sequence
  Non-cyclic GFR-binding peptide
AAPASSSVPARLNAISVLYF

SEQ ID NO: 308 - protein, 20 aa, Artificial Sequence
  Non-cyclic GFR-binding peptide
STPPTSSVPTRLNAISVLYF

SEQ ID NO: 309 - protein, 20 aa, Artificial Sequence
  Non-cyclic GFR-binding peptide
RVPSTSSAPVKTNAISVLYF

SEQ ID NO: 310 - protein, 20 aa, Artificial Sequence
  Non-cyclic GFR-binding peptide
ASAAPSSVPQALNAISVLYF

SEQ ID NO: 311 - protein, 20 aa, Artificial Sequence
  Non-cyclic GFR-binding peptide
ASASPSSVSQDLNAISVLYF

SEQ ID NO: 312 - protein, 20 aa, Artificial Sequence
  Non-cyclic GFR-binding peptide
ASASPSSVPQDLNAISVLYF

SEQ ID NO: 313 - protein, 20 aa, Artificial Sequence
  Non-cyclic GFR-binding peptide
NDEGLESVPTEENAISVLYF

SEQ ID NO: 314 - protein, 20 aa, Artificial Sequence
  Non-cyclic GFR-binding peptide
SSVKSQPSRVHHNAISVLYF

SEQ ID NO: 315 - protein, 20 aa, Artificial Sequence
  Non-cyclic GFR-binding peptide
KIPKASSAPTELSATSVLYY

SEQ ID NO: 316 - protein, 20 aa, Artificial Sequence
  Non-cyclic GFR-binding peptide
GIPEPSSAPTKMSATSVLYY

SEQ ID NO: 317 - protein, 20 aa, Artificial Sequence
  Non-cyclic GFR-binding peptide
SIPKASSAPTELSATSVLYY

SEQ ID NO: 318 - protein, 20 aa, Artificial Sequence
  Non-cyclic GFR-binding peptide
HVTKPTSAPTKLSATSVLYY

SEQ ID NO: 319 - protein, 20 aa, Artificial Sequence
  Non-cyclic GFR-binding peptide
YVPKPSSAPTKLSATSVLYY

SEQ ID NO: 320 - protein, 20 aa, Artificial Sequence
  Non-cyclic GFR-binding peptide
TVPKPSSAPTQLSATSVLYY

SEQ ID NO: 321 - protein, 20 aa, Artificial Sequence
  Non-cyclic GFR-binding peptide
KVGKASSAPTKLSATSVLYY

SEQ ID NO: 322 - protein, 20 aa, Artificial Sequence
  Non-cyclic GFR-binding peptide
KASKASSAPTKLSATSVLYY

SEQ ID NO: 323 - protein, 20 aa, Artificial Sequence
  Non-cyclic GFR-binding peptide
GSAGPSSAPTKMSATSVLYY

SEQ ID NO: 324 - protein, 20 aa, Artificial Sequence
  Non-cyclic GFR-binding peptide
AAPASSSAPTRLSATSVLYY

SEQ ID NO: 325 - protein, 20 aa, Artificial Sequence
  Non-cyclic GFR-binding peptide
STPPTSSAPTRLSATSVLYY

SEQ ID NO: 326 - protein, 20 aa, Artificial Sequence
  Non-cyclic GFR-binding peptide
HVPKPSSAPTKLSATSVLYY

SEQ ID NO: 327 - protein, 20 aa, Artificial Sequence
  Non-cyclic GFR-binding peptide
SIPKASSVPTELSATSVLYY

SEQ ID NO: 328 - protein, 20 aa, Artificial Sequence
  Non-cyclic GFR-binding peptide
KVGKASSVPTKLSATSVLYY

SEQ ID NO: 329 - protein, 20 aa, Artificial Sequence
  Non-cyclic GFR-binding peptide
KASKASSVPTKLSATSVLYY

SEQ ID NO: 330 - protein, 20 aa, Artificial Sequence
  Non-cyclic GFR-binding peptide
GSAGPSSTPTKMSATSVLYY

SEQ ID NO: 331 - protein, 20 aa, Artificial Sequence
  Non-cyclic GFR-binding peptide
AAPASSSVPARLSATSVLYY

SEQ ID NO: 332 - protein, 20 aa, Artificial Sequence
  Non-cyclic GFR-binding peptide
STPPTSSVPTRLSATSVLYY

SEQ ID NO: 333 - protein, 20 aa, Artificial Sequence
  Non-cyclic GFR-binding peptide
RVPSTSSAPVKTSATSVLYY

SEQ ID NO: 334 - protein, 20 aa, Artificial Sequence
  Non-cyclic GFR-binding peptide
ASAAPSSVPQALSATSVLYY

SEQ ID NO: 335 - protein, 20 aa, Artificial Sequence
  Non-cyclic GFR-binding peptide
ASASPSSVSQDLSATSVLYY

SEQ ID NO: 336 - protein, 20 aa, Artificial Sequence
  Non-cyclic GFR-binding peptide
ASASPSSVPQDLSATSVLYY

SEQ ID NO: 337 - protein, 20 aa, Artificial Sequence
  Non-cyclic GFR-binding peptide
NDEGLESVPTEESATSVLYY

SEQ ID NO: 338 - protein, 20 aa, Artificial Sequence
  Non-cyclic GFR-binding peptide
NDEGLESVPTGQSATSVLYY

SEQ ID NO: 339 - protein, 20 aa, Artificial Sequence
  Non-cyclic GFR-binding peptide
SSVKSQPSRVHHSATSVLYY

SEQ ID NO: 340 - protein, 20 aa, Artificial Sequence
  Non-cyclic GFR-binding peptide
RNVQSRPTQVQLSATSVLYY

SEQ ID NO: 341 - protein, 20 aa, Artificial Sequence
  Non-cyclic GFR-binding peptide
GIPEPSSVPTKMSPISVLYK

SEQ ID NO: 342 - protein, 20 aa, Artificial Sequence
  Non-cyclic GFR-binding peptide
SIPKASSVPTELSPISVLYK

SEQ ID NO: 343 - protein, 20 aa, Artificial Sequence
  Non-cyclic GFR-binding peptide
HVTKPTSVPTKLSPISVLYK

SEQ ID NO: 344 - protein, 20 aa, Artificial Sequence
  Non-cyclic GFR-binding peptide
YVPKPSSVPTKLSPISVLYK

SEQ ID NO: 345 - protein, 20 aa, Artificial Sequence
  Non-cyclic GFR-binding peptide
TVPKPSSVPTQLSPISVLYK

SEQ ID NO: 346 - protein, 20 aa, Artificial Sequence
  Non-cyclic GFR-binding peptide
AVPKASSVPTKLSPISVLYK

SEQ ID NO: 347 - protein, 20 aa, Artificial Sequence
  Non-cyclic GFR-binding peptide
KASKASSVPTKLSPISVLYK

SEQ ID NO: 348 - protein, 20 aa, Artificial Sequence
  Non-cyclic GFR-binding peptide
AAPASSSVPTRLSPISVLYK

SEQ ID NO: 349 - protein, 20 aa, Artificial Sequence
  Non-cyclic GFR-binding peptide
STPPTSSVPTRLSPISVLYK

SEQ ID NO: 350 - protein, 20 aa, Artificial Sequence
  Non-cyclic GFR-binding peptide
RVPSTSSVPTKTSPISVLYK

SEQ ID NO: 351 - protein, 20 aa, Artificial Sequence
  Non-cyclic GFR-binding peptide
ASAAPSSVPTALSPISVLYK

SEQ ID NO: 352 - protein, 20 aa, Artificial Sequence
  Non-cyclic GFR-binding peptide
ASASPSSVPTDLSPISVLYK

SEQ ID NO: 353 - protein, 20 aa, Artificial Sequence
  Non-cyclic GFR-binding peptide
GIPEPSSVPEKMSPISVLYK

SEQ ID NO: 354 - protein, 20 aa, Artificial Sequence
  Non-cyclic GFR-binding peptide
HVTKPTSAPTKLSPISVLYK

SEQ ID NO: 355 - protein, 20 aa, Artificial Sequence
  Non-cyclic GFR-binding peptide
YVPKPSSAPTKLSPISVLYK

SEQ ID NO: 356 - protein, 20 aa, Artificial Sequence
  Non-cyclic GFR-binding peptide
TVPKPSSAPTQLSPISVLYK

SEQ ID NO: 357 - protein, 20 aa, Artificial Sequence
  Non-cyclic GFR-binding peptide
AVPKASSAPTKLSPISVLYK

SEQ ID NO: 358 - protein, 20 aa, Artificial Sequence
  Non-cyclic GFR-binding peptide
GSAGPSSTPTKMSPISVLYK

SEQ ID NO: 359 - protein, 20 aa, Artificial Sequence
  Non-cyclic GFR-binding peptide
AAPASSSVPARLSPISVLYK

SEQ ID NO: 360 - protein, 20 aa, Artificial Sequence
  Non-cyclic GFR-binding peptide
HVPKPSSAPTKLSPISVLYK

SEQ ID NO: 361 - protein, 20 aa, Artificial Sequence
  Non-cyclic GFR-binding peptide
RVPSTSSAPVKTSPISVLYK

SEQ ID NO: 362 - protein, 20 aa, Artificial Sequence
  Non-cyclic GFR-binding peptide
ASAAPSSVPQALSPISVLYK

SEQ ID NO: 363 - protein, 20 aa, Artificial Sequence
  Non-cyclic GFR-binding peptide
ASASPSSVSQDLSPISVLYK

SEQ ID NO: 364 - protein, 20 aa, Artificial Sequence
  Non-cyclic GFR-binding peptide
ASASPSSVPQDLSPISVLYK

SEQ ID NO: 365 - protein, 20 aa, Artificial Sequence
  Non-cyclic GFR-binding peptide
SSVKSQPSRVHHSPISVLYK

SEQ ID NO: 366 - protein, 20 aa, Artificial Sequence
  Non-cyclic GFR-binding peptide
RNVQSRPTQVQLSPISVLYK

SEQ ID NO: 367 - protein, 20 aa, Artificial Sequence
  Non-cyclic GFR-binding peptide
KIPKASSVPTELEPISILYL

SEQ ID NO: 368 - protein, 20 aa, Artificial Sequence
  Non-cyclic GFR-binding peptide
GIPEPSSVPTKMEPISILYL

SEQ ID NO: 369 - protein, 20 aa, Artificial Sequence
  Non-cyclic GFR-binding peptide
SIPKASSVPTELEPISILYL

SEQ ID NO: 370 - protein, 20 aa, Artificial Sequence
  Non-cyclic GFR-binding peptide
HVTKPTSVPTKLEPISILYL

SEQ ID NO: 371 - protein, 20 aa, Artificial Sequence
  Non-cyclic GFR-binding peptide
YVPKPSSVPTKLEPISILYL

SEQ ID NO: 372 - protein, 20 aa, Artificial Sequence
  Non-cyclic GFR-binding peptide
TVPKPSSVPTQLEPISILYL

SEQ ID NO: 373 - protein, 20 aa, Artificial Sequence
  Non-cyclic GFR-binding peptide
AVPKASSVPTKLEPISILYL

SEQ ID NO: 374 - protein, 20 aa, Artificial Sequence
  Non-cyclic GFR-binding peptide
GSAGPSSVPTKMEPISILYL

SEQ ID NO: 375 - protein, 20 aa, Artificial Sequence
  Non-cyclic GFR-binding peptide
AAPASSSVPTRLEPISILYL

SEQ ID NO: 376 - protein, 20 aa, Artificial Sequence
  Non-cyclic GFR-binding peptide
STPPTSSVPTRLEPISILYL

SEQ ID NO: 377 - protein, 20 aa, Artificial Sequence
  Non-cyclic GFR-binding peptide
HVPKPSSVPTKLEPISILYL

SEQ ID NO: 378 - protein, 20 aa, Artificial Sequence
  Non-cyclic GFR-binding peptide
RVPSTSSVPTKTEPISILYL

SEQ ID NO: 379 - protein, 20 aa, Artificial Sequence
  Non-cyclic GFR-binding peptide
ASAAPSSVPTALEPISILYL

SEQ ID NO: 380 - protein, 20 aa, Artificial Sequence
  Non-cyclic GFR-binding peptide
ASASPSSVPTDLEPISILYL

SEQ ID NO: 381 - protein, 20 aa, Artificial Sequence
  Non-cyclic GFR-binding peptide
GIPEPSSVPEKMEPISILYL

SEQ ID NO: 382 - protein, 20 aa, Artificial Sequence
  Non-cyclic GFR-binding peptide
HVTKPTSAPTKLEPISILYL

SEQ ID NO: 383 - protein, 20 aa, Artificial Sequence
  Non-cyclic GFR-binding peptide
YVPKPSSAPTKLEPISILYL

SEQ ID NO: 384 - protein, 20 aa, Artificial Sequence
  Non-cyclic GFR-binding peptide
TVPKPSSAPTQLEPISILYL

SEQ ID NO: 385 - protein, 20 aa, Artificial Sequence
  Non-cyclic GFR-binding peptide
GSAGPSSTPTKMEPISILYL

SEQ ID NO: 386 - protein, 20 aa, Artificial Sequence
  Non-cyclic GFR-binding peptide
AAPASSSVPARLEPISILYL

SEQ ID NO: 387 - protein, 20 aa, Artificial Sequence
  Non-cyclic GFR-binding peptide
ASAAPSSVPQALEPISILYL

SEQ ID NO: 388 - protein, 20 aa, Artificial Sequence
  Non-cyclic GFR-binding peptide
ASASPSSVSQDLEPISILYL

SEQ ID NO: 389 - protein, 20 aa, Artificial Sequence
  Non-cyclic GFR-binding peptide
ASASPSSVPQDLEPISILYL

SEQ ID NO: 390 - protein, 20 aa, Artificial Sequence
  Non-cyclic GFR-binding peptide
SSVKSQPSRVHHEPISILYL

SEQ ID NO: 391 - protein, 20 aa, Artificial Sequence
  Non-cyclic GFR-binding peptide
RNVQSRPTQVQLEPISILYL

SEQ ID NO: 392 - protein, 20 aa, Artificial Sequence
  Non-cyclic GFR-binding peptide
HVTKPTSTPTKLSPINMLYF

SEQ ID NO: 393 - protein, 20 aa, Artificial Sequence
  Non-cyclic GFR-binding peptide
TVPKPSSTPTQLSPINMLYF

SEQ ID NO: 394 - protein, 20 aa, Artificial Sequence
  Non-cyclic GFR-binding peptide
AVPKASSTPTKLSPINMLYF

SEQ ID NO: 395 - protein, 20 aa, Artificial Sequence
  Non-cyclic GFR-binding peptide
KVGKASSTPTKLSPINMLYF

SEQ ID NO: 396 - protein, 20 aa, Artificial Sequence
  Non-cyclic GFR-binding peptide
KASKASSTPTKLSPINMLYF

SEQ ID NO: 397 - protein, 20 aa, Artificial Sequence
  Non-cyclic GFR-binding peptide
AAPASSSTPTRLSPINMLYF

SEQ ID NO: 398 - protein, 20 aa, Artificial Sequence
  Non-cyclic GFR-binding peptide
STPPTSSTPTRLSPINMLYF

SEQ ID NO: 399 - protein, 20 aa, Artificial Sequence
  Non-cyclic GFR-binding peptide
HVPKPSSTPTKLSPINMLYF

SEQ ID NO: 400 - protein, 20 aa, Artificial Sequence
  Non-cyclic GFR-binding peptide
RVPSTSSTPTKTSPINMLYF

SEQ ID NO: 401 - protein, 20 aa, Artificial Sequence
  Non-cyclic GFR-binding peptide
ASAAPSSTPTALSPINMLYF

SEQ ID NO: 402 - protein, 20 aa, Artificial Sequence
  Non-cyclic GFR-binding peptide
ASASPSSTPTDLSPINMLYF

SEQ ID NO: 403 - protein, 20 aa, Artificial Sequence
  Non-cyclic GFR-binding peptide
KIPKASSVPTELSPINMLYF

SEQ ID NO: 404 - protein, 20 aa, Artificial Sequence
  Non-cyclic GFR-binding peptide
GIPEPSSVPEKMSPINMLYF

SEQ ID NO: 405 - protein, 20 aa, Artificial Sequence
  Non-cyclic GFR-binding peptide
SIPKASSVPTELSPINMLYF

SEQ ID NO: 406 - protein, 20 aa, Artificial Sequence
  Non-cyclic GFR-binding peptide
HVTKPTSAPTKLSPINMLYF

SEQ ID NO: 407 - protein, 20 aa, Artificial Sequence
  Non-cyclic GFR-binding peptide
YVPKPSSAPTKLSPINMLYF

SEQ ID NO: 408 - protein, 20 aa, Artificial Sequence
  Non-cyclic GFR-binding peptide
TVPKPSSAPTQLSPINMLYF

SEQ ID NO: 409 - protein, 20 aa, Artificial Sequence
  Non-cyclic GFR-binding peptide
AVPKASSAPTKLSPINMLYF

SEQ ID NO: 410 - protein, 20 aa, Artificial Sequence
  Non-cyclic GFR-binding peptide
KVGKASSVPTKLSPINMLYF

SEQ ID NO: 411 - protein, 20 aa, Artificial Sequence
  Non-cyclic GFR-binding peptide
KASKASSVPTKLSPINMLYF

SEQ ID NO: 412 - protein, 20 aa, Artificial Sequence
  Non-cyclic GFR-binding peptide
AAPASSSVPARLSPINMLYF

SEQ ID NO: 413 - protein, 20 aa, Artificial Sequence
  Non-cyclic GFR-binding peptide
STPPTSSVPTRLSPINMLYF

SEQ ID NO: 414 - protein, 20 aa, Artificial Sequence
  Non-cyclic GFR-binding peptide
HVPKPSSAPTKLSPINMLYF

SEQ ID NO: 415 - protein, 20 aa, Artificial Sequence
  Non-cyclic GFR-binding peptide
RVPSTSSAPVKTSPINMLYF

SEQ ID NO: 416 - protein, 20 aa, Artificial Sequence
  Non-cyclic GFR-binding peptide
ASAAPSSVPQALSPINMLYF

SEQ ID NO: 417 - protein, 20 aa, Artificial Sequence
  Non-cyclic GFR-binding peptide
ASASPSSVSQDLSPINMLYF

SEQ ID NO: 418 - protein, 20 aa, Artificial Sequence
  Non-cyclic GFR-binding peptide
ASASPSSVPQDLSPINMLYF

SEQ ID NO: 419 - protein, 20 aa, Artificial Sequence
  Non-cyclic GFR-binding peptide
NDEGLESVPTEESPINMLYF

SEQ ID NO: 420 - protein, 20 aa, Artificial Sequence
  Non-cyclic GFR-binding peptide
NDEGLESVPTGQSPINMLYF

SEQ ID NO: 421 - protein, 20 aa, Artificial Sequence
  Non-cyclic GFR-binding peptide
SSVKSQPSRVHHSPINMLYF

SEQ ID NO: 422 - protein, 20 aa, Artificial Sequence
  Non-cyclic GFR-binding peptide
RNVQSRPTQVQLSPINMLYF

SEQ ID NO: 423 - protein, 20 aa, Artificial Sequence
  Non-cyclic GFR-binding peptide
KIPKASSVPAELSPISILYI

SEQ ID NO: 424 - protein, 20 aa, Artificial Sequence
  Non-cyclic GFR-binding peptide
SIPKASSVPAELSPISILYI

SEQ ID NO: 425 - protein, 20 aa, Artificial Sequence
  Non-cyclic GFR-binding peptide
HVTKPTSVPAKLSPISILYI

SEQ ID NO: 426 - protein, 20 aa, Artificial Sequence
  Non-cyclic GFR-binding peptide
YVPKPSSVPAKLSPISILYI

SEQ ID NO: 427 - protein, 20 aa, Artificial Sequence
  Non-cyclic GFR-binding peptide
TVPKPSSVPAQLSPISILYI

SEQ ID NO: 428 - protein, 20 aa, Artificial Sequence
  Non-cyclic GFR-binding peptide
AVPKASSVPAKLSPISILYI

SEQ ID NO: 429 - protein, 20 aa, Artificial Sequence
  Non-cyclic GFR-binding peptide
KVGKASSVPAKLSPISILYI

SEQ ID NO: 430 - protein, 20 aa, Artificial Sequence
  Non-cyclic GFR-binding peptide
KASKASSVPAKLSPISILYI

SEQ ID NO: 431 - protein, 20 aa, Artificial Sequence
  Non-cyclic GFR-binding peptide
GSAGPSSVPAKMSPISILYI

SEQ ID NO: 432 - protein, 20 aa, Artificial Sequence
  Non-cyclic GFR-binding peptide
STPPTSSVPARLSPISILYI

SEQ ID NO: 433 - protein, 20 aa, Artificial Sequence
  Non-cyclic GFR-binding peptide
HVPKPSSVPAKLSPISILYI

SEQ ID NO: 434 - protein, 20 aa, Artificial Sequence
  Non-cyclic GFR-binding peptide
ASASPSSVPADLSPISILYI

SEQ ID NO: 435 - protein, 20 aa, Artificial Sequence
  Non-cyclic GFR-binding peptide
KIPKASSVPTELSPISILYI

SEQ ID NO: 436 - protein, 20 aa, Artificial Sequence
  Non-cyclic GFR-binding peptide
SIPKASSVPTELSPISILYI

SEQ ID NO: 437 - protein, 20 aa, Artificial Sequence
  Non-cyclic GFR-binding peptide
HVTKPTSAPTKLSPISILYI

SEQ ID NO: 438 - protein, 20 aa, Artificial Sequence
  Non-cyclic GFR-binding peptide
YVPKPSSAPTKLSPISILYI

SEQ ID NO: 439 - protein, 20 aa, Artificial Sequence
  Non-cyclic GFR-binding peptide
AVPKASSAPTKLSPISILYI

SEQ ID NO: 440 - protein, 20 aa, Artificial Sequence
  Non-cyclic GFR-binding peptide
KVGKASSVPTKLSPISILYI

SEQ ID NO: 441 - protein, 20 aa, Artificial Sequence
  Non-cyclic GFR-binding peptide
KASKASSVPTKLSPISILYI

SEQ ID NO: 442 - protein, 20 aa, Artificial Sequence
  Non-cyclic GFR-binding peptide
GSAGPSSTPTKMSPISILYI

SEQ ID NO: 443 - protein, 20 aa, Artificial Sequence
  Non-cyclic GFR-binding peptide
STPPTSSVPTRLSPISILYI

SEQ ID NO: 444 - protein, 20 aa, Artificial Sequence
  Non-cyclic GFR-binding peptide
HVPKPSSAPTKLSPISILYI

SEQ ID NO: 445 - protein, 20 aa, Artificial Sequence
  Non-cyclic GFR-binding peptide
RVPSTSSAPVKTSPISILYI

SEQ ID NO: 446 - protein, 20 aa, Artificial Sequence
  Non-cyclic GFR-binding peptide
ASAAPSSVPQALSPISILYI

SEQ ID NO: 447 - protein, 20 aa, Artificial Sequence
  Non-cyclic GFR-binding peptide
ASASPSSVSQDLSPISILYI

SEQ ID NO: 448 - protein, 20 aa, Artificial Sequence
  Non-cyclic GFR-binding peptide
ASASPSSVPQDLSPISILYI

SEQ ID NO: 449 - protein, 20 aa, Artificial Sequence
  Non-cyclic GFR-binding peptide
NDEGLESVPTGQSPISILYI

SEQ ID NO: 450 - protein, 20 aa, Artificial Sequence
  Non-cyclic GFR-binding peptide
SSVKSQPSRVHHSPISILYI

SEQ ID NO: 451 - protein, 20 aa, Artificial Sequence
  Non-cyclic GFR-binding peptide
RNVQSRPTQVQLSPISILYI

SEQ ID NO: 452 - protein, 20 aa, Artificial Sequence
  Non-cyclic GFR-binding peptide
KIPKASSVPTELSPISILFI

SEQ ID NO: 453 - protein, 20 aa, Artificial Sequence
  Non-cyclic GFR-binding peptide
GIPEPSSVPTKMSPISILFI

SEQ ID NO: 454 - protein, 20 aa, Artificial Sequence
  Non-cyclic GFR-binding peptide
SIPKASSVPTELSPISILFI

SEQ ID NO: 455 - protein, 20 aa, Artificial Sequence
  Non-cyclic GFR-binding peptide
HVTKPTSVPTKLSPISILFI

SEQ ID NO: 456 - protein, 20 aa, Artificial Sequence
  Non-cyclic GFR-binding peptide
YVPKPSSVPTKLSPISILFI

SEQ ID NO: 457 - protein, 20 aa, Artificial Sequence
  Non-cyclic GFR-binding peptide
TVPKPSSVPTQLSPISILFI

SEQ ID NO: 458 - protein, 20 aa, Artificial Sequence
  Non-cyclic GFR-binding peptide
AVPKASSVPTKLSPISILFI

SEQ ID NO: 459 - protein, 20 aa, Artificial Sequence
  Non-cyclic GFR-binding peptide
KVGKASSVPTKLSPISILFI

SEQ ID NO: 460 - protein, 20 aa, Artificial Sequence
  Non-cyclic GFR-binding peptide
KASKASSVPTKLSPISILFI

SEQ ID NO: 461 - protein, 20 aa, Artificial Sequence
  Non-cyclic GFR-binding peptide
GSAGPSSVPTKMSPISILFI

SEQ ID NO: 462 - protein, 20 aa, Artificial Sequence
  Non-cyclic GFR-binding peptide
AAPASSSVPTRLSPISILFI

SEQ ID NO: 463 - protein, 20 aa, Artificial Sequence
  Non-cyclic GFR-binding peptide
HVPKPSSVPTKLSPISILFI

SEQ ID NO: 464 - protein, 20 aa, Artificial Sequence
  Non-cyclic GFR-binding peptide
RVPSTSSVPTKTSPISILFI

SEQ ID NO: 465 - protein, 20 aa, Artificial Sequence
  Non-cyclic GFR-binding peptide
ASAAPSSVPTALSPISILFI

SEQ ID NO: 466 - protein, 20 aa, Artificial Sequence
  Non-cyclic GFR-binding peptide
ASASPSSVPTDLSPISILFI

SEQ ID NO: 467 - protein, 20 aa, Artificial Sequence
  Non-cyclic GFR-binding peptide
GIPEPSSVPEKMSPISILFI

SEQ ID NO: 468 - protein, 20 aa, Artificial Sequence
  Non-cyclic GFR-binding peptide
HVTKPTSAPTKLSPISILFI

SEQ ID NO: 469 - protein, 20 aa, Artificial Sequence
  Non-cyclic GFR-binding peptide
YVPKPSSAPTKLSPISILFI

SEQ ID NO: 470 - protein, 20 aa, Artificial Sequence
  Non-cyclic GFR-binding peptide
TVPKPSSAPTQLSPISILFI

SEQ ID NO: 471 - protein, 20 aa, Artificial Sequence
  Non-cyclic GFR-binding peptide
AVPKASSAPTKLSPISILFI

SEQ ID NO: 472 - protein, 20 aa, Artificial Sequence
  Non-cyclic GFR-binding peptide
GSAGPSSTPTKMSPISILFI

SEQ ID NO: 473 - protein, 20 aa, Artificial Sequence
  Non-cyclic GFR-binding peptide
AAPASSSVPARLSPISILFI

SEQ ID NO: 474 - protein, 20 aa, Artificial Sequence
  Non-cyclic GFR-binding peptide
HVPKPSSAPTKLSPISILFI

SEQ ID NO: 475 - protein, 20 aa, Artificial Sequence
  Non-cyclic GFR-binding peptide
RVPSTSSAPVKTSPISILFI

SEQ ID NO: 476 - protein, 20 aa, Artificial Sequence
  Non-cyclic GFR-binding peptide
ASAAPSSVPQALSPISILFI

SEQ ID NO: 477 - protein, 20 aa, Artificial Sequence
  Non-cyclic GFR-binding peptide
ASASPSSVSQDLSPISILFI

SEQ ID NO: 478 - protein, 20 aa, Artificial Sequence
  Non-cyclic GFR-binding peptide
ASASPSSVPQDLSPISILFI

SEQ ID NO: 479 - protein, 20 aa, Artificial Sequence
  Non-cyclic GFR-binding peptide
KIPKASSAPVELKPLSMLYV

SEQ ID NO: 480 - protein, 20 aa, Artificial Sequence
  Non-cyclic GFR-binding peptide
GIPEPSSAPVKMKPLSMLYV

SEQ ID NO: 481 - protein, 20 aa, Artificial Sequence
  Non-cyclic GFR-binding peptide
SIPKASSAPVELKPLSMLYV

SEQ ID NO: 482 - protein, 20 aa, Artificial Sequence
  Non-cyclic GFR-binding peptide
HVTKPTSAPVKLKPLSMLYV

SEQ ID NO: 483 - protein, 20 aa, Artificial Sequence
  Non-cyclic GFR-binding peptide
YVPKPSSAPVKLKPLSMLYV

SEQ ID NO: 484 - protein, 20 aa, Artificial Sequence
  Non-cyclic GFR-binding peptide
TVPKPSSAPVQLKPLSMLYV

SEQ ID NO: 485 - protein, 20 aa, Artificial Sequence
  Non-cyclic GFR-binding peptide
AVPKASSAPVKLKPLSMLYV

SEQ ID NO: 486 - protein, 20 aa, Artificial Sequence
  Non-cyclic GFR-binding peptide
KVGKASSAPVKLKPLSMLYV

SEQ ID NO: 487 - protein, 20 aa, Artificial Sequence
  Non-cyclic GFR-binding peptide
KASKASSAPVKLKPLSMLYV

SEQ ID NO: 488 - protein, 20 aa, Artificial Sequence
  Non-cyclic GFR-binding peptide
GSAGPSSAPVKMKPLSMLYV

SEQ ID NO: 489 - protein, 20 aa, Artificial Sequence
  Non-cyclic GFR-binding peptide
AAPASSSAPVRLKPLSMLYV

SEQ ID NO: 490 - protein, 20 aa, Artificial Sequence
  Non-cyclic GFR-binding peptide
STPPTSSAPVRLKPLSMLYV

SEQ ID NO: 491 - protein, 20 aa, Artificial Sequence
  Non-cyclic GFR-binding peptide
HVPKPSSAPVKLKPLSMLYV

SEQ ID NO: 492 - protein, 20 aa, Artificial Sequence
  Non-cyclic GFR-binding peptide
ASAAPSSAPVALKPLSMLYV

SEQ ID NO: 493 - protein, 20 aa, Artificial Sequence
  Non-cyclic GFR-binding peptide
ASASPSSAPVDLKPLSMLYV

SEQ ID NO: 494 - protein, 20 aa, Artificial Sequence
  Non-cyclic GFR-binding peptide
KIPKASSVPTELKPLSMLYV

SEQ ID NO: 495 - protein, 20 aa, Artificial Sequence
  Non-cyclic GFR-binding peptide
GIPEPSSVPEKMKPLSMLYV

SEQ ID NO: 496 - protein, 20 aa, Artificial Sequence
  Non-cyclic GFR-binding peptide
SIPKASSVPTELKPLSMLYV

SEQ ID NO: 497 - protein, 20 aa, Artificial Sequence
  Non-cyclic GFR-binding peptide
HVTKPTSAPTKLKPLSMLYV

SEQ ID NO: 498 - protein, 20 aa, Artificial Sequence
  Non-cyclic GFR-binding peptide
YVPKPSSAPTKLKPLSMLYV

SEQ ID NO: 499 - protein, 20 aa, Artificial Sequence
  Non-cyclic GFR-binding peptide
TVPKPSSAPTQLKPLSMLYV

SEQ ID NO: 500 - protein, 20 aa, Artificial Sequence
  Non-cyclic GFR-binding peptide
AVPKASSAPTKLKPLSMLYV

SEQ ID NO: 501 - protein, 20 aa, Artificial Sequence
  Non-cyclic GFR-binding peptide
KVGKASSVPTKLKPLSMLYV

SEQ ID NO: 502 - protein, 20 aa, Artificial Sequence
  Non-cyclic GFR-binding peptide
KASKASSVPTKLKPLSMLYV

SEQ ID NO: 503 - protein, 20 aa, Artificial Sequence
  Non-cyclic GFR-binding peptide
GSAGPSSTPTKMKPLSMLYV

SEQ ID NO: 504 - protein, 20 aa, Artificial Sequence
  Non-cyclic GFR-binding peptide
AAPASSSVPARLKPLSMLYV

SEQ ID NO: 505 - protein, 20 aa, Artificial Sequence
  Non-cyclic GFR-binding peptide
STPPTSSVPTRLKPLSMLYV

SEQ ID NO: 506 - protein, 20 aa, Artificial Sequence
  Non-cyclic GFR-binding peptide
HVPKPSSAPTKLKPLSMLYV

SEQ ID NO: 507 - protein, 20 aa, Artificial Sequence
  Non-cyclic GFR-binding peptide
ASAAPSSVPQALKPLSMLYV

SEQ ID NO: 508 - protein, 20 aa, Artificial Sequence
  Non-cyclic GFR-binding peptide
ASASPSSVSQDLKPLSMLYV

SEQ ID NO: 509 - protein, 20 aa, Artificial Sequence
  Non-cyclic GFR-binding peptide
ASASPSSVPQDLKPLSMLYV

SEQ ID NO: 510 - protein, 20 aa, Artificial Sequence
  Non-cyclic GFR-binding peptide
NDEGLESVPTEEKPLSMLYV

SEQ ID NO: 511 - protein, 20 aa, Artificial Sequence
  Non-cyclic GFR-binding peptide
NDEGLESVPTGQKPLSMLYV

SEQ ID NO: 512 - protein, 20 aa, Artificial Sequence
  Non-cyclic GFR-binding peptide
HVTKPTSVPQKLEPLPIVYY

SEQ ID NO: 513 - protein, 20 aa, Artificial Sequence
  Non-cyclic GFR-binding peptide
YVPKPSSVPQKLEPLPIVYY

SEQ ID NO: 514 - protein, 20 aa, Artificial Sequence
  Non-cyclic GFR-binding peptide
TVPKPSSVPQQLEPLPIVYY

SEQ ID NO: 515 - protein, 20 aa, Artificial Sequence
  Non-cyclic GFR-binding peptide
AVPKASSVPQKLEPLPIVYY

SEQ ID NO: 516 - protein, 20 aa, Artificial Sequence
  Non-cyclic GFR-binding peptide
GSAGPSSVPQKMEPLPIVYY

SEQ ID NO: 517 - protein, 20 aa, Artificial Sequence
  Non-cyclic GFR-binding peptide
AAPASSSVPQRLEPLPIVYY

SEQ ID NO: 518 - protein, 20 aa, Artificial Sequence
  Non-cyclic GFR-binding peptide
STPPTSSVPQRLEPLPIVYY

SEQ ID NO: 519 - protein, 20 aa, Artificial Sequence
  Non-cyclic GFR-binding peptide
HVPKPSSVPQKLEPLPIVYY

SEQ ID NO: 520 - protein, 20 aa, Artificial Sequence
  Non-cyclic GFR-binding peptide
RVPSTSSVPQKTEPLPIVYY

SEQ ID NO: 521 - protein, 20 aa, Artificial Sequence
  Non-cyclic GFR-binding peptide
ASASPSSVPQDLEPLPIVYY

SEQ ID NO: 522 - protein, 20 aa, Artificial Sequence
  Non-cyclic GFR-binding peptide
GIPEPSSVPEKMEPLPIVYY

SEQ ID NO: 523 - protein, 20 aa, Artificial Sequence
  Non-cyclic GFR-binding peptide
SIPKASSVPTELEPLPIVYY

SEQ ID NO: 524 - protein, 20 aa, Artificial Sequence
  Non-cyclic GFR-binding peptide
HVTKPTSAPTKLEPLPIVYY

SEQ ID NO: 525 - protein, 20 aa, Artificial Sequence
  Non-cyclic GFR-binding peptide
YVPKPSSAPTKLEPLPIVYY

SEQ ID NO: 526 - protein, 20 aa, Artificial Sequence
  Non-cyclic GFR-binding peptide
TVPKPSSAPTQLEPLPIVYY

SEQ ID NO: 527 - protein, 20 aa, Artificial Sequence
  Non-cyclic GFR-binding peptide
KVGKASSVPTKLEPLPIVYY

SEQ ID NO: 528 - protein, 20 aa, Artificial Sequence
  Non-cyclic GFR-binding peptide
KASKASSVPTKLEPLPIVYY

SEQ ID NO: 529 - protein, 20 aa, Artificial Sequence
  Non-cyclic GFR-binding peptide
GSAGPSSTPTKMEPLPIVYY

SEQ ID NO: 530 - protein, 20 aa, Artificial Sequence
  Non-cyclic GFR-binding peptide
AAPASSSVPARLEPLPIVYY

SEQ ID NO: 531 - protein, 20 aa, Artificial Sequence
  Non-cyclic GFR-binding peptide
STPPTSSVPTRLEPLPIVYY

SEQ ID NO: 532 - protein, 20 aa, Artificial Sequence
  Non-cyclic GFR-binding peptide
HVPKPSSAPTKLEPLPIVYY

SEQ ID NO: 533 - protein, 20 aa, Artificial Sequence
  Non-cyclic GFR-binding peptide
RVPSTSSAPVKTEPLPIVYY

SEQ ID NO: 534 - protein, 20 aa, Artificial Sequence
  Non-cyclic GFR-binding peptide
ASASPSSVSQDLEPLPIVYY

SEQ ID NO: 535 - protein, 20 aa, Artificial Sequence
  Non-cyclic GFR-binding peptide
NDEGLESVPTEEEPLPIVYY

SEQ ID NO: 536 - protein, 20 aa, Artificial Sequence
  Non-cyclic GFR-binding peptide
NDEGLESVPTGQEPLPIVYY

SEQ ID NO: 537 - protein, 20 aa, Artificial Sequence
  Non-cyclic GFR-binding peptide
SSVKSQPSRVHHEPLPIVYY

SEQ ID NO: 538 - protein, 20 aa, Artificial Sequence
  Non-cyclic GFR-binding peptide
RNVQSRPTQVQLEPLPIVYY

SEQ ID NO: 539 - protein, 20 aa, Artificial Sequence
  Non-cyclic GFR-binding peptide
GIPEPSSVSQKMEPLTILYY

SEQ ID NO: 540 - protein, 20 aa, Artificial Sequence
  Non-cyclic GFR-binding peptide
SIPKASSVSQELEPLTILYY

SEQ ID NO: 541 - protein, 20 aa, Artificial Sequence
  Non-cyclic GFR-binding peptide
HVTKPTSVSQKLEPLTILYY

SEQ ID NO: 542 - protein, 20 aa, Artificial Sequence
  Non-cyclic GFR-binding peptide
YVPKPSSVSQKLEPLTILYY

SEQ ID NO: 543 - protein, 20 aa, Artificial Sequence
  Non-cyclic GFR-binding peptide
TVPKPSSVSQQLEPLTILYY

SEQ ID NO: 544 - protein, 20 aa, Artificial Sequence
  Non-cyclic GFR-binding peptide
AVPKASSVSQKLEPLTILYY

SEQ ID NO: 545 - protein, 20 aa, Artificial Sequence
  Non-cyclic GFR-binding peptide
KASKASSVSQKLEPLTILYY

SEQ ID NO: 546 - protein, 20 aa, Artificial Sequence
  Non-cyclic GFR-binding peptide
GSAGPSSVSQKMEPLTILYY

SEQ ID NO: 547 - protein, 20 aa, Artificial Sequence
  Non-cyclic GFR-binding peptide
AAPASSSVSQRLEPLTILYY

SEQ ID NO: 548 - protein, 20 aa, Artificial Sequence
  Non-cyclic GFR-binding peptide
STPPTSSVSQRLEPLTILYY

SEQ ID NO: 549 - protein, 20 aa, Artificial Sequence
  Non-cyclic GFR-binding peptide
HVPKPSSVSQKLEPLTILYY

SEQ ID NO: 550 - protein, 20 aa, Artificial Sequence
  Non-cyclic GFR-binding peptide
RVPSTSSVSQKTEPLTILYY

SEQ ID NO: 551 - protein, 20 aa, Artificial Sequence
  Non-cyclic GFR-binding peptide
ASAAPSSVSQALEPLTILYY

SEQ ID NO: 552 - protein, 20 aa, Artificial Sequence
  Non-cyclic GFR-binding peptide
KIPKASSVPTELEPLTILYY

SEQ ID NO: 553 - protein, 20 aa, Artificial Sequence
  Non-cyclic GFR-binding peptide
GIPEPSSVPEKMEPLTILYY

SEQ ID NO: 554 - protein, 20 aa, Artificial Sequence
  Non-cyclic GFR-binding peptide
SIPKASSVPTELEPLTILYY

SEQ ID NO: 555 - protein, 20 aa, Artificial Sequence
  Non-cyclic GFR-binding peptide
HVTKPTSAPTKLEPLTILYY

SEQ ID NO: 556 - protein, 20 aa, Artificial Sequence
  Non-cyclic GFR-binding peptide
YVPKPSSAPTKLEPLTILYY

SEQ ID NO: 557 - protein, 20 aa, Artificial Sequence
  Non-cyclic GFR-binding peptide
TVPKPSSAPTQLEPLTILYY

SEQ ID NO: 558 - protein, 20 aa, Artificial Sequence
  Non-cyclic GFR-binding peptide
AVPKASSAPTKLEPLTILYY

SEQ ID NO: 559 - protein, 20 aa, Artificial Sequence
  Non-cyclic GFR-binding peptide
KASKASSVPTKLEPLTILYY

SEQ ID NO: 560 - protein, 20 aa, Artificial Sequence
  Non-cyclic GFR-binding peptide
GSAGPSSTPTKMEPLTILYY

SEQ ID NO: 561 - protein, 20 aa, Artificial Sequence
  Non-cyclic GFR-binding peptide
AAPASSSVPARLEPLTILYY

SEQ ID NO: 562 - protein, 20 aa, Artificial Sequence
  Non-cyclic GFR-binding peptide
STPPTSSVPTRLEPLTILYY

SEQ ID NO: 563 - protein, 20 aa, Artificial Sequence
  Non-cyclic GFR-binding peptide
HVPKPSSAPTKLEPLTILYY

SEQ ID NO: 564 - protein, 20 aa, Artificial Sequence
  Non-cyclic GFR-binding peptide
RVPSTSSAPVKTEPLTILYY

SEQ ID NO: 565 - protein, 20 aa, Artificial Sequence
  Non-cyclic GFR-binding peptide
NDEGLESVPTGQEPLTILYY

SEQ ID NO: 566 - protein, 20 aa, Artificial Sequence
  Non-cyclic GFR-binding peptide
SSVKSQPSRVHHEPLTILYY

SEQ ID NO: 567 - protein, 20 aa, Artificial Sequence
  Non-cyclic GFR-binding peptide
RNVQSRPTQVQLEPLTILYY

SEQ ID NO: 568 - protein, 20 aa, Artificial Sequence
  Non-cyclic GFR-binding peptide
KIPKASSVPQELEPLTILYY

SEQ ID NO: 569 - protein, 20 aa, Artificial Sequence
  Non-cyclic GFR-binding peptide
GIPEPSSVPQKMEPLTILYY

SEQ ID NO: 570 - protein, 20 aa, Artificial Sequence
  Non-cyclic GFR-binding peptide
SIPKASSVPQELEPLTILYY

SEQ ID NO: 571 - protein, 20 aa, Artificial Sequence
  Non-cyclic GFR-binding peptide
HVTKPTSVPQKLEPLTILYY

SEQ ID NO: 572 - protein, 20 aa, Artificial Sequence
  Non-cyclic GFR-binding peptide
YVPKPSSVPQKLEPLTILYY

SEQ ID NO: 573 - protein, 20 aa, Artificial Sequence
  Non-cyclic GFR-binding peptide
TVPKPSSVPQQLEPLTILYY

SEQ ID NO: 574 - protein, 20 aa, Artificial Sequence
  Non-cyclic GFR-binding peptide
AVPKASSVPQKLEPLTILYY

SEQ ID NO: 575 - protein, 20 aa, Artificial Sequence
  Non-cyclic GFR-binding peptide
KVGKASSVPQKLEPLTILYY

SEQ ID NO: 576 - protein, 20 aa, Artificial Sequence
  Non-cyclic GFR-binding peptide
KASKASSVPQKLEPLTILYY

SEQ ID NO: 577 - protein, 20 aa, Artificial Sequence
  Non-cyclic GFR-binding peptide
GSAGPSSVPQKMEPLTILYY

SEQ ID NO: 578 - protein, 20 aa, Artificial Sequence
  Non-cyclic GFR-binding peptide
AAPASSSVPQRLEPLTILYY

SEQ ID NO: 579 - protein, 20 aa, Artificial Sequence
  Non-cyclic GFR-binding peptide
STPPTSSVPQRLEPLTILYY

SEQ ID NO: 580 - protein, 20 aa, Artificial Sequence
  Non-cyclic GFR-binding peptide
HVPKPSSVPQKLEPLTILYY

SEQ ID NO: 581 - protein, 20 aa, Artificial Sequence
  Non-cyclic GFR-binding peptide
RVPSTSSVPQKTEPLTILYY

SEQ ID NO: 582 - protein, 20 aa, Artificial Sequence
  Non-cyclic GFR-binding peptide
NDEGLESVPTGQSNITMQIM

SEQ ID NO: 583 - protein, 20 aa, Artificial Sequence
  Non-cyclic GFR-binding peptide
GIPEPSSVPEKMSNITMQIM

SEQ ID NO: 584 - protein, 20 aa, Artificial Sequence
  Non-cyclic GFR-binding peptide
HVTKPTSAPTKLSNITMQIM

SEQ ID NO: 585 - protein, 20 aa, Artificial Sequence
  Non-cyclic GFR-binding peptide
YVPKPSSAPTKLSNITMQIM

SEQ ID NO: 586 - protein, 20 aa, Artificial Sequence
  Non-cyclic GFR-binding peptide
TVPKPSSAPTQLSNITMQIM

SEQ ID NO: 587 - protein, 20 aa, Artificial Sequence
  Non-cyclic GFR-binding peptide
AVPKASSAPTKLSNITMQIM

SEQ ID NO: 588 - protein, 20 aa, Artificial Sequence
  Non-cyclic GFR-binding peptide
HVPKPSSAPTKLSNITMQIM

SEQ ID NO: 589 - protein, 20 aa, Artificial Sequence
  Non-cyclic GFR-binding peptide
RVPSTSSAPVKTSNITMQIM

SEQ ID NO: 590 - protein, 20 aa, Artificial Sequence
  Non-cyclic GFR-binding peptide
ASAAPSSVPQALSNITMQIM

SEQ ID NO: 591 - protein, 20 aa, Artificial Sequence
  Non-cyclic GFR-binding peptide
ASASPSSVSQDLSNITMQIM

SEQ ID NO: 592 - protein, 20 aa, Artificial Sequence
  Non-cyclic GFR-binding peptide
ASASPSSVPQDLSNITMQIM

SEQ ID NO: 593 - protein, 20 aa, Artificial Sequence
  Non-cyclic GFR-binding peptide
SSVKSQPSRVHHSNITMQIM

SEQ ID NO: 594 - protein, 20 aa, Artificial Sequence
  Non-cyclic GFR-binding peptide
RNVQSRPTQVQLSNITMQIM

SEQ ID NO: 595 - protein, 20 aa, Artificial Sequence
  Non-cyclic GFR-binding peptide
RNVQSRPSRVQLRSVKVAKV

SEQ ID NO: 596 - protein, 20 aa, Artificial Sequence
  Non-cyclic GFR-binding peptide
KIPKASSVPTELRSVKVAKV

SEQ ID NO: 597 - protein, 20 aa, Artificial Sequence
  Non-cyclic GFR-binding peptide
GIPEPSSVPEKMRSVKVAKV

SEQ ID NO: 598 - protein, 20 aa, Artificial Sequence
  Non-cyclic GFR-binding peptide
YVPKPSSAPTKLRSVKVAKV

SEQ ID NO: 599 - protein, 20 aa, Artificial Sequence
  Non-cyclic GFR-binding peptide
AVPKASSAPTKLRSVKVAKV

SEQ ID NO: 600 - protein, 20 aa, Artificial Sequence
  Non-cyclic GFR-binding peptide
KVGKASSVPTKLRSVKVAKV

SEQ ID NO: 601 - protein, 20 aa, Artificial Sequence
  Non-cyclic GFR-binding peptide
KASKASSVPTKLRSVKVAKV

SEQ ID NO: 602 - protein, 20 aa, Artificial Sequence
  Non-cyclic GFR-binding peptide
GSAGPSSTPTKMRSVKVAKV

SEQ ID NO: 603 - protein, 20 aa, Artificial Sequence
  Non-cyclic GFR-binding peptide
AAPASSSVPARLRSVKVAKV

SEQ ID NO: 604 - protein, 20 aa, Artificial Sequence
  Non-cyclic GFR-binding peptide
STPPTSSVPTRLRSVKVAKV

SEQ ID NO: 605 - protein, 20 aa, Artificial Sequence
  Non-cyclic GFR-binding peptide
HVPKPSSAPTKLRSVKVAKV

SEQ ID NO: 606 - protein, 20 aa, Artificial Sequence
  Non-cyclic GFR-binding peptide
RVPSTSSAPVKTRSVKVAKV

SEQ ID NO: 607 - protein, 20 aa, Artificial Sequence
  Non-cyclic GFR-binding peptide
ASASPSSVSQDLRSVKVAKV

SEQ ID NO: 608 - protein, 20 aa, Artificial Sequence
  Non-cyclic GFR-binding peptide
NDEGLESVPTGQRSVKVAKV

SEQ ID NO: 609 - protein, 20 aa, Artificial Sequence
  Non-cyclic GFR-binding peptide
RNVQSRPTQVQLRSVKVAKV

SEQ ID NO: 610 - protein, 20 aa, Artificial Sequence
  Non-cyclic GFR-binding peptide
SSVKSQPTQVHHRPVQVRKI

SEQ ID NO: 611 - protein, 20 aa, Artificial Sequence
  Non-cyclic GFR-binding peptide
KIPKASSVPTELRPVQVRKI

SEQ ID NO: 612 - protein, 20 aa, Artificial Sequence
  Non-cyclic GFR-binding peptide
GIPEPSSVPEKMRPVQVRKI

SEQ ID NO: 613 - protein, 20 aa, Artificial Sequence
  Non-cyclic GFR-binding peptide
SIPKASSVPTELRPVQVRKI

SEQ ID NO: 614 - protein, 20 aa, Artificial Sequence
  Non-cyclic GFR-binding peptide
HVTKPTSAPTKLRPVQVRKI

SEQ ID NO: 615 - protein, 20 aa, Artificial Sequence
  Non-cyclic GFR-binding peptide
YVPKPSSAPTKLRPVQVRKI

SEQ ID NO: 616 - protein, 20 aa, Artificial Sequence
  Non-cyclic GFR-binding peptide
TVPKPSSAPTQLRPVQVRKI

SEQ ID NO: 617 - protein, 20 aa, Artificial Sequence
  Non-cyclic GFR-binding peptide
AVPKASSAPTKLRPVQVRKI

SEQ ID NO: 618 - protein, 20 aa, Artificial Sequence
  Non-cyclic GFR-binding peptide
KVGKASSVPTKLRPVQVRKI

SEQ ID NO: 619 - protein, 20 aa, Artificial Sequence
  Non-cyclic GFR-binding peptide
KASKASSVPTKLRPVQVRKI

SEQ ID NO: 620 - protein, 20 aa, Artificial Sequence
  Non-cyclic GFR-binding peptide
GSAGPSSTPTKMRPVQVRKI

SEQ ID NO: 621 - protein, 20 aa, Artificial Sequence
  Non-cyclic GFR-binding peptide
AAPASSSVPARLRPVQVRKI

SEQ ID NO: 622 - protein, 20 aa, Artificial Sequence
  Non-cyclic GFR-binding peptide
STPPTSSVPTRLRPVQVRKI

SEQ ID NO: 623 - protein, 20 aa, Artificial Sequence
  Non-cyclic GFR-binding peptide
HVPKPSSAPTKLRPVQVRKI

SEQ ID NO: 624 - protein, 20 aa, Artificial Sequence
  Non-cyclic GFR-binding peptide
RVPSTSSAPVKTRPVQVRKI

SEQ ID NO: 625 - protein, 20 aa, Artificial Sequence
  Non-cyclic GFR-binding peptide
ASASPSSVSQDLRPVQVRKI

SEQ ID NO: 626 - protein, 20 aa, Artificial Sequence
  Non-cyclic GFR-binding peptide
NDEGLESVPTGQRPVQVRKI

SEQ ID NO: 627 - protein, 20 aa, Artificial Sequence
  Non-cyclic GFR-binding peptide
SSVKSQPSRVHHRPVQVRKI

SEQ ID NO: 628 - protein, 8 aa, Artificial Sequence
  Non-cyclic GFR-binding peptide
SAISILYL

SEQ ID NO: 629 - protein, 8 aa, Artificial Sequence
  Non-cyclic GFR-binding peptide
SAISVLYL

SEQ ID NO: 630 - protein, 8 aa, Artificial Sequence
  Non-cyclic GFR-binding peptide
SSLSMLFF

SEQ ID NO: 631 - protein, 8 aa, Artificial Sequence
  Non-cyclic GFR-binding peptide
SSLSVLFF

SEQ ID NO: 632 - protein, 8 aa, Artificial Sequence
  Non-cyclic GFR-binding peptide
NAISMLYF

SEQ ID NO: 633 - protein, 8 aa, Artificial Sequence
  Non-cyclic GFR-binding peptide
NAISILYF

SEQ ID NO: 634 - protein, 8 aa, Artificial Sequence
  Non-cyclic GFR-binding peptide
SATSMLYY

SEQ ID NO: 635 - protein, 8 aa, Artificial Sequence
  Non-cyclic GFR-binding peptide
SATSILYY

SEQ ID NO: 636 - protein, 8 aa, Artificial Sequence
  Non-cyclic GFR-binding peptide
SPISMLYK

SEQ ID NO: 637 - protein, 8 aa, Artificial Sequence
  Non-cyclic GFR-binding peptide
SPISILYK

SEQ ID NO: 638 - protein, 8 aa, Artificial Sequence
  Non-cyclic GFR-binding peptide
EPISMLYL

SEQ ID NO: 639 - protein, 8 aa, Artificial Sequence
  Non-cyclic GFR-binding peptide
EPISVLYL

SEQ ID NO: 640 - protein, 8 aa, Artificial Sequence
  Non-cyclic GFR-binding peptide
SPINILYF

SEQ ID NO: 641 - protein, 8 aa, Artificial Sequence
  Non-cyclic GFR-binding peptide
SPINVLYF

SEQ ID NO: 642 - protein, 8 aa, Artificial Sequence
  Non-cyclic GFR-binding peptide
SPISMLYI

SEQ ID NO: 643 - protein, 8 aa, Artificial Sequence
  Non-cyclic GFR-binding peptide
SPISVLYI

SEQ ID NO: 644 - protein, 8 aa, Artificial Sequence
  Non-cyclic GFR-binding peptide
SPISMLFI

SEQ ID NO: 645 - protein, 8 aa, Artificial Sequence
  Non-cyclic GFR-binding peptide
SPISVLFI

SEQ ID NO: 646 - protein, 8 aa, Artificial Sequence
  Non-cyclic GFR-binding peptide
KPLSILYV

SEQ ID NO: 647 - protein, 8 aa, Artificial Sequence
  Non-cyclic GFR-binding peptide
KPLSVLYV

SEQ ID NO: 648 - protein, 8 aa, Artificial Sequence
  Non-cyclic GFR-binding peptide
EPLPMVYY

SEQ ID NO: 649 - protein, 8 aa, Artificial Sequence
  Non-cyclic GFR-binding peptide
EPLPVVYY

SEQ ID NO: 650 - protein, 8 aa, Artificial Sequence
  Non-cyclic GFR-binding peptide
EPLTMLYY

SEQ ID NO: 651 - protein, 8 aa, Artificial Sequence
  Non-cyclic GFR-binding peptide
EPLTVLYY

SEQ ID NO: 652 - protein, 8 aa, Artificial Sequence
  Non-cyclic GFR-binding peptide
SNITIQIM

SEQ ID NO: 653 - protein, 8 aa, Artificial Sequence
  Non-cyclic GFR-binding peptide
SNITVQIM

SEQ ID NO: 654 - protein, 8 aa, Artificial Sequence
  Non-cyclic GFR-binding peptide
RSVKMAKV

SEQ ID NO: 655 - protein, 8 aa, Artificial Sequence
  Non-cyclic GFR-binding peptide
RSVKIAKV

SEQ ID NO: 656 - protein, 8 aa, Artificial Sequence
  Non-cyclic GFR-binding peptide
RPVQMRKI

SEQ ID NO: 657 - protein, 8 aa, Artificial Sequence
  Non-cyclic GFR-binding peptide
RPVQIRKI

SEQ ID NO: 658 - protein, 20 aa, Artificial Sequence
  Non-cyclic GFR-binding peptide
LYLMSIASMKTPVSSPGASG

SEQ ID NO: 659 - protein, 20 aa, Artificial Sequence
  Non-cyclic GFR-binding peptide
LYLMSIASLRTPVSSSAPAA

SEQ ID NO: 660 - protein, 20 aa, Artificial Sequence
  Non-cyclic GFR-binding peptide
LYLMSIASLRTPVSSTPPTS

SEQ ID NO: 661 - protein, 20 aa, Artificial Sequence
  Non-cyclic GFR-binding peptide
FYLVSIANEETPASELGEDN

SEQ ID NO: 662 - protein, 20 aa, Artificial Sequence
  Non-cyclic GFR-binding peptide
FYLVSIANQGTPASELGEDN

SEQ ID NO: 663 - protein, 20 aa, Artificial Sequence
  Non-cyclic GFR-binding peptide
YYLVSTASLETPVSSAKPIK

SEQ ID NO: 664 - protein, 20 aa, Artificial Sequence
  Non-cyclic GFR-binding peptide
YYLVSTASMKEPVSSPEPIG

SEQ ID NO: 665 - protein, 20 aa, Artificial Sequence
  Non-cyclic GFR-binding peptide
KYLVSIPSMKTPVSSPGASG

SEQ ID NO: 666 - protein, 20 aa, Artificial Sequence
  Non-cyclic GFR-binding peptide
FYLVSIANLQVQTPRSQVNR

SEQ ID NO: 667 - protein, 20 aa, Artificial Sequence
  Non-cyclic GFR-binding peptide
LYLMSIASLKTPASSPKPVH

SEQ ID NO: 668 - protein, 20 aa, Artificial Sequence
  Non-cyclic GFR-binding peptide
LYLMSIASLQVQTPRSQVNR

SEQ ID NO: 669 - protein, 20 aa, Artificial Sequence
  Non-cyclic GFR-binding peptide
LYLMSIASLDQSVSSPSASA

SEQ ID NO: 670 - protein, 20 aa, Artificial Sequence
  Non-cyclic GFR-binding peptide
KYLVSIPSLKTPVSSPKPVH

SEQ ID NO: 671 - protein, 20 aa, Artificial Sequence
  Non-cyclic GFR-binding peptide
FYLVSIANQGTPVSELGEDN

SEQ ID NO: 672 - protein, 20 aa, Artificial Sequence
  Non-cyclic GFR-binding peptide
LYLMSIASLKTPVSSAKGGG

SEQ ID NO: 673 - protein, 24 aa, Artificial Sequence
  Non-cyclic GFR-binding peptide
LYLMSIASMKTPTSSPGASGWFWW

SEQ ID NO: 674 - protein, 25 aa, Artificial Sequence
  Non-cyclic GFR-binding peptide
LYLMSIASLKTPVSTPKTVHPGPTG

SEQ ID NO: 675 - protein, 18 aa, Artificial Sequence
  Non-cyclic GFR-binding peptide
YYLITLPELEQPVPGPTG

SEQ ID NO: 676 - protein, 18 aa, Artificial Sequence
  Non-cyclic GFR-binding peptide
KYLVSIPSLETPVPGPTG

SEQ ID NO: 677 - protein, 21 aa, Artificial Sequence
  Non-cyclic GFR-binding peptide
LYLMSIASLKTPVSSAPGPTG

SEQ ID NO: 678 - protein, 18 aa, Artificial Sequence
  Non-cyclic GFR-binding peptide
LYLMSIASQGTPVPGPTG

SEQ ID NO: 679 - protein, 18 aa, Artificial Sequence
  Non-cyclic GFR-binding peptide
LYLMSIASEETPVPGPTG

SEQ ID NO: 680 - protein, 21 aa, Artificial Sequence
  Non-cyclic GFR-binding peptide
KYLVSIPSLKTPVSTPPGPTG

SEQ ID NO: 681 - protein, 21 aa, Artificial Sequence
  Non-cyclic GFR-binding peptide
KYLVSIPSLKTPVSSPPGPTG

SEQ ID NO: 682 - protein, 25 aa, Artificial Sequence
  Non-cyclic GFR-binding peptide
FYLVSIANQGTPASELGEDNPGPTG

SEQ ID NO: 683 - protein, 25 aa, Artificial Sequence
  Non-cyclic GFR-binding peptide
KYLVSIPSLRTPVSSSAPAAGWFWW

SEQ ID NO: 684 - protein, 25 aa, Artificial Sequence
  Non-cyclic GFR-binding peptide
LYLMSIASLKTPVSSAKSAKGWFWW

SEQ ID NO: 685 - protein, 25 aa, Artificial Sequence
  Non-cyclic GFR-binding peptide
LYLMSIASMKTPTSSPGASGPGPTG

SEQ ID NO: 686 - protein, 25 aa, Artificial Sequence
  Non-cyclic GFR-binding peptide
LYLMSIASLRAPVSSSAPAAPGPTG

SEQ ID NO: 687 - protein, 20 aa, Artificial Sequence
  Non-cyclic GFR-binding peptide
YYVIPLPELKTPASSAKPVA

SEQ ID NO: 688 - protein, 20 aa, Artificial Sequence
  Non-cyclic GFR-binding peptide
YYLITLPELEQSVSSAKPIK

SEQ ID NO: 689 - protein, 20 aa, Artificial Sequence
  Non-cyclic GFR-binding peptide
VKAVKVSRLRVRSSSTPPTS

SEQ ID NO: 690 - protein, 20 aa, Artificial Sequence
  Non-cyclic GFR-binding peptide
MIQMTINSLKTPVSSAKGVK

SEQ ID NO: 691 - protein, 20 aa, Artificial Sequence
  Non-cyclic GFR-binding peptide
IKRVQVPRLDVQTSSPSASA

SEQ ID NO: 692 - protein, 20 aa, Artificial Sequence
  Non-cyclic GFR-binding peptide
FFLISLSSLKEPVSSAKSAA

SEQ ID NO: 693 - protein, 20 aa, Artificial Sequence
  Non-cyclic GFR-binding peptide
FFLISLSSMKEPVSSPGASG

SEQ ID NO: 694 - protein, 20 aa, Artificial Sequence
  Non-cyclic GFR-binding peptide
IYLISIPSTKAPVSSTSPVR

SEQ ID NO: 695 - protein, 20 aa, Artificial Sequence
  Non-cyclic GFR-binding peptide
IYLISIPSLAAPVSSPAASA

SEQ ID NO: 696 - protein, 20 aa, Artificial Sequence
  Non-cyclic GFR-binding peptide
IYLISIPSEEAPVSELGEDN

SEQ ID NO: 697 - protein, 13 aa, Artificial Sequence
  Non-cyclic GFR-binding peptide
IYLISIPSQGAPV

SEQ ID NO: 698 - protein, 13 aa, Artificial Sequence
  Non-cyclic GFR-binding peptide
IYLISIPSEEAPV

SEQ ID NO: 699 - protein, 20 aa, Artificial Sequence
  Non-cyclic GFR-binding peptide
IYLISIPSMKAPVSSPEPIG

SEQ ID NO: 700 - protein, 20 aa, Artificial Sequence
  Non-cyclic GFR-binding peptide
IKRVQVPRLAQPVSSPAASA

SEQ ID NO: 701 - protein, 18 aa, Artificial Sequence
  Non-cyclic GFR-binding peptide
IKRVQVPRLDQSVSSPSA

SEQ ID NO: 702 - protein, 20 aa, Artificial Sequence
  Non-cyclic GFR-binding peptide
IKRVQVPRLDQPVSSPSASA

SEQ ID NO: 703 - protein, 20 aa, Artificial Sequence
  Non-cyclic GFR-binding peptide
IKRVQVPREETPVSELGEDN

SEQ ID NO: 704 - protein, 8 aa, Artificial Sequence
  Non-cyclic GFR-binding peptide
IKRVQVPR

SEQ ID NO: 705 - protein, 20 aa, Artificial Sequence
  Non-cyclic GFR-binding peptide
MIQMTINSLQTPVSSPKPVT

SEQ ID NO: 706 - protein, 20 aa, Artificial Sequence
  Non-cyclic GFR-binding peptide
MIQMTINSLKTPVSSAKSAK

SEQ ID NO: 707 - protein, 20 aa, Artificial Sequence
  Non-cyclic GFR-binding peptide
MIQMTINSMKTPTSSPGASG

SEQ ID NO: 708 - protein, 20 aa, Artificial Sequence
  Non-cyclic GFR-binding peptide
MIQMTINSLRAPVSSSAPAA

SEQ ID NO: 709 - protein, 20 aa, Artificial Sequence
  Non-cyclic GFR-binding peptide
YYLVSTASLDTPASSPSASA

SEQ ID NO: 710 - protein, 20 aa, Artificial Sequence
  Non-cyclic GFR-binding peptide
VKAVKVSRLETPVSSAKPIS

SEQ ID NO: 711 - protein, 20 aa, Artificial Sequence
  Non-cyclic GFR-binding peptide
VKAVKVSRLKTPASTPKTVH

SEQ ID NO: 712 - protein, 20 aa, Artificial Sequence
  Non-cyclic GFR-binding peptide
IKRVQVPRLEVQTSSAKPIS

SEQ ID NO: 713 - protein, 20 aa, Artificial Sequence
  Non-cyclic GFR-binding peptide
IYLISIPSEETPVSELGEDN

SEQ ID NO: 714 - protein, 20 aa, Artificial Sequence
  Non-cyclic GFR-binding peptide
IYLISIPSHHVRSPQSKVVV

SEQ ID NO: 715 - protein, 20 aa, Artificial Sequence
  Non-cyclic GFR-binding peptide
LYLISIPETKVPASSTSPVR

SEQ ID NO: 716 - protein, 20 aa, Artificial Sequence
  Non-cyclic GFR-binding peptide
LYLMSIASMKTPVSSPEPIG

SEQ ID NO: 717 - protein, 20 aa, Artificial Sequence
  Non-cyclic GFR-binding peptide
LYLMSIASLKTPVSTPKTVH

SEQ ID NO: 718 - protein, 20 aa, Artificial Sequence
  Non-cyclic GFR-binding peptide
LYLMSIASLKTPVSSPKPVY

SEQ ID NO: 719 - protein, 20 aa, Artificial Sequence
  Non-cyclic GFR-binding peptide
LYLMSIASLQTPVSSPKPVT

SEQ ID NO: 720 - protein, 20 aa, Artificial Sequence
  Non-cyclic GFR-binding peptide
LYLMSIASLKTPVSSAKPVA

SEQ ID NO: 721 - protein, 20 aa, Artificial Sequence
  Non-cyclic GFR-binding peptide
LYLMSIASLKTPVSSAKSAK

SEQ ID NO: 722 - protein, 20 aa, Artificial Sequence
  Non-cyclic GFR-binding peptide
LYLMSIASLKTPVSSPKPVH

SEQ ID NO: 723 - protein, 20 aa, Artificial Sequence
  Non-cyclic GFR-binding peptide
LYLMSIASLATPVSSPAASA

SEQ ID NO: 724 - protein, 20 aa, Artificial Sequence
  Non-cyclic GFR-binding peptide
LYLMSIASLDTPVSSPSASA

SEQ ID NO: 725 - protein, 20 aa, Artificial Sequence
  Non-cyclic GFR-binding peptide
LYLMSIASMKEPVSSPEPIG

SEQ ID NO: 726 - protein, 20 aa, Artificial Sequence
  Non-cyclic GFR-binding peptide
LYLMSIASLKTPASTPKTVH

SEQ ID NO: 727 - protein, 20 aa, Artificial Sequence
  Non-cyclic GFR-binding peptide
LYLMSIASLKTPASSPKPVY

SEQ ID NO: 728 - protein, 20 aa, Artificial Sequence
  Non-cyclic GFR-binding peptide
LYLMSIASMKTPTSSPGASG

SEQ ID NO: 729 - protein, 20 aa, Artificial Sequence
  Non-cyclic GFR-binding peptide
LYLMSIASLRAPVSSSAPAA

SEQ ID NO: 730 - protein, 20 aa, Artificial Sequence
  Non-cyclic GFR-binding peptide
LYLMSIASTKVPASSTSPVR

SEQ ID NO: 731 - protein, 20 aa, Artificial Sequence
  Non-cyclic GFR-binding peptide
LYLMSIASLAQPVSSPAASA

SEQ ID NO: 732 - protein, 20 aa, Artificial Sequence
  Non-cyclic GFR-binding peptide
LYLMSIASLDQPVSSPSASA

SEQ ID NO: 733 - protein, 20 aa, Artificial Sequence
  Non-cyclic GFR-binding peptide
LYLMSIASHHVRSPQSKVSS

SEQ ID NO: 734 - protein, 20 aa, Artificial Sequence
  Non-cyclic GFR-binding peptide
FFLISLSSLEEPVSSAKPIK

SEQ ID NO: 735 - protein, 20 aa, Artificial Sequence
  Non-cyclic GFR-binding peptide
FFLISLSSLEEPVSSAKPIS

SEQ ID NO: 736 - protein, 20 aa, Artificial Sequence
  Non-cyclic GFR-binding peptide
FFLISLSSLKEPVSSPKPVY

SEQ ID NO: 737 - protein, 20 aa, Artificial Sequence
  Non-cyclic GFR-binding peptide
FFLISLSSLQEPVSSPKPVT

SEQ ID NO: 738 - protein, 20 aa, Artificial Sequence
  Non-cyclic GFR-binding peptide
FFLISLSSLKEPVSSAKPVA

SEQ ID NO: 739 - protein, 20 aa, Artificial Sequence
  Non-cyclic GFR-binding peptide
FFLISLSSLKEPVSSAKGVK

SEQ ID NO: 740 - protein, 20 aa, Artificial Sequence
  Non-cyclic GFR-binding peptide
FFLISLSSLKEPVSSAKSAK

SEQ ID NO: 741 - protein, 20 aa, Artificial Sequence
  Non-cyclic GFR-binding peptide
FFLISLSSLREPVSSSAPAA

SEQ ID NO: 742 - protein, 20 aa, Artificial Sequence
  Non-cyclic GFR-binding peptide
FFLISLSSLREPVSSTPPTS

SEQ ID NO: 743 - protein, 20 aa, Artificial Sequence
  Non-cyclic GFR-binding peptide
FFLISLSSLKEPVSSPKPVH

SEQ ID NO: 744 - protein, 20 aa, Artificial Sequence
  Non-cyclic GFR-binding peptide
FFLISLSSTKEPVSSTSPVR

SEQ ID NO: 745 - protein, 20 aa, Artificial Sequence
  Non-cyclic GFR-binding peptide
FFLISLSSLAEPVSSPAASA

SEQ ID NO: 746 - protein, 20 aa, Artificial Sequence
  Non-cyclic GFR-binding peptide
FFLISLSSLDEPVSSPSASA

SEQ ID NO: 747 - protein, 20 aa, Artificial Sequence
  Non-cyclic GFR-binding peptide
FFLISLSSLETPVSSAKPIK

SEQ ID NO: 748 - protein, 20 aa, Artificial Sequence
  Non-cyclic GFR-binding peptide
FFLISLSSLETPVSSAKPIS

SEQ ID NO: 749 - protein, 20 aa, Artificial Sequence
  Non-cyclic GFR-binding peptide
FFLISLSSLKTPASTPKTVH

SEQ ID NO: 750 - protein, 20 aa, Artificial Sequence
  Non-cyclic GFR-binding peptide
FFLISLSSLKTPASSPKPVY

SEQ ID NO: 751 - protein, 20 aa, Artificial Sequence
  Non-cyclic GFR-binding peptide
FFLISLSSLQTPASSPKPVT

SEQ ID NO: 752 - protein, 20 aa, Artificial Sequence
  Non-cyclic GFR-binding peptide
FFLISLSSLKTPASSAKPVA

SEQ ID NO: 753 - protein, 20 aa, Artificial Sequence
  Non-cyclic GFR-binding peptide
FFLISLSSLKTPVSSAKGVK

SEQ ID NO: 754 - protein, 20 aa, Artificial Sequence
  Non-cyclic GFR-binding peptide
FFLISLSSLKTPVSSAKSAK

SEQ ID NO: 755 - protein, 20 aa, Artificial Sequence
  Non-cyclic GFR-binding peptide
FFLISLSSMKTPTSSPGASG

SEQ ID NO: 756 - protein, 20 aa, Artificial Sequence
  Non-cyclic GFR-binding peptide
FFLISLSSLRAPVSSSAPAA

SEQ ID NO: 757 - protein, 20 aa, Artificial Sequence
  Non-cyclic GFR-binding peptide
FFLISLSSLRTPVSSTPPTS

SEQ ID NO: 758 - protein, 20 aa, Artificial Sequence
  Non-cyclic GFR-binding peptide
FFLISLSSLKTPASSPKPVH

SEQ ID NO: 759 - protein, 20 aa, Artificial Sequence
  Non-cyclic GFR-binding peptide
FFLISLSSTKVPASSTSPVR

SEQ ID NO: 760 - protein, 20 aa, Artificial Sequence
  Non-cyclic GFR-binding peptide
FFLISLSSLDQPVSSPSASA

SEQ ID NO: 761 - protein, 20 aa, Artificial Sequence
  Non-cyclic GFR-binding peptide
FFLISLSSQGTPVSELGEDN

SEQ ID NO: 762 - protein, 20 aa, Artificial Sequence
  Non-cyclic GFR-binding peptide
FFLISLSSHHVRSPQSKVSS

SEQ ID NO: 763 - protein, 20 aa, Artificial Sequence
  Non-cyclic GFR-binding peptide
FFLISLSSLQVQTPRSQVNR

SEQ ID NO: 764 - protein, 20 aa, Artificial Sequence
  Non-cyclic GFR-binding peptide
FYLVSIANLETPASSAKPIK

SEQ ID NO: 765 - protein, 20 aa, Artificial Sequence
  Non-cyclic GFR-binding peptide
FYLVSIANMKTPASSPEPIG

SEQ ID NO: 766 - protein, 20 aa, Artificial Sequence
  Non-cyclic GFR-binding peptide
FYLVSIANLETPASSAKPIS

SEQ ID NO: 767 - protein, 20 aa, Artificial Sequence
  Non-cyclic GFR-binding peptide
FYLVSIANLKTPASSAKPVA

SEQ ID NO: 768 - protein, 20 aa, Artificial Sequence
  Non-cyclic GFR-binding peptide
FYLVSIANLKTPASSAKGVK

SEQ ID NO: 769 - protein, 20 aa, Artificial Sequence
  Non-cyclic GFR-binding peptide
FYLVSIANLKTPASSAKSAK

SEQ ID NO: 770 - protein, 20 aa, Artificial Sequence
  Non-cyclic GFR-binding peptide
FYLVSIANMKTPASSPGASG

SEQ ID NO: 771 - protein, 20 aa, Artificial Sequence
  Non-cyclic GFR-binding peptide
FYLVSIANLRTPASSSAPAA

SEQ ID NO: 772 - protein, 20 aa, Artificial Sequence
  Non-cyclic GFR-binding peptide
FYLVSIANLRTPASSTPPTS

SEQ ID NO: 773 - protein, 20 aa, Artificial Sequence
  Non-cyclic GFR-binding peptide
FYLVSIANTKTPASSTSPVR

SEQ ID NO: 774 - protein, 20 aa, Artificial Sequence
  Non-cyclic GFR-binding peptide
FYLVSIANLATPASSPAASA

SEQ ID NO: 775 - protein, 20 aa, Artificial Sequence
  Non-cyclic GFR-binding peptide
FYLVSIANLDTPASSPSASA

SEQ ID NO: 776 - protein, 20 aa, Artificial Sequence
  Non-cyclic GFR-binding peptide
FYLVSIANLETPVSSAKPIK

SEQ ID NO: 777 - protein, 20 aa, Artificial Sequence
  Non-cyclic GFR-binding peptide
FYLVSIANMKEPVSSPEPIG

SEQ ID NO: 778 - protein, 20 aa, Artificial Sequence
  Non-cyclic GFR-binding peptide
FYLVSIANLETPVSSAKPIS

SEQ ID NO: 779 - protein, 20 aa, Artificial Sequence
  Non-cyclic GFR-binding peptide
FYLVSIANLKTPVSSAKGVK

SEQ ID NO: 780 - protein, 20 aa, Artificial Sequence
  Non-cyclic GFR-binding peptide
FYLVSIANLKTPVSSAKSAK

SEQ ID NO: 781 - protein, 20 aa, Artificial Sequence
  Non-cyclic GFR-binding peptide
FYLVSIANMKTPTSSPGASG

SEQ ID NO: 782 - protein, 20 aa, Artificial Sequence
  Non-cyclic GFR-binding peptide
FYLVSIANLRAPVSSSAPAA

SEQ ID NO: 783 - protein, 20 aa, Artificial Sequence
  Non-cyclic GFR-binding peptide
FYLVSIANLRTPVSSTPPTS

SEQ ID NO: 784 - protein, 20 aa, Artificial Sequence
  Non-cyclic GFR-binding peptide
FYLVSIANTKVPASSTSPVR

SEQ ID NO: 785 - protein, 20 aa, Artificial Sequence
  Non-cyclic GFR-binding peptide
FYLVSIANLAQPVSSPAASA

SEQ ID NO: 786 - protein, 20 aa, Artificial Sequence
  Non-cyclic GFR-binding peptide
FYLVSIANLDQSVSSPSASA

SEQ ID NO: 787 - protein, 20 aa, Artificial Sequence
  Non-cyclic GFR-binding peptide
FYLVSIANLDQPVSSPSASA

SEQ ID NO: 788 - protein, 20 aa, Artificial Sequence
  Non-cyclic GFR-binding peptide
FYLVSIANEETPVSELGEDN

SEQ ID NO: 789 - protein, 20 aa, Artificial Sequence
  Non-cyclic GFR-binding peptide
FYLVSIANHHVRSPQSKVSS

SEQ ID NO: 790 - protein, 20 aa, Artificial Sequence
  Non-cyclic GFR-binding peptide
YYLVSTASLETPASSAKPIK

SEQ ID NO: 791 - protein, 20 aa, Artificial Sequence
  Non-cyclic GFR-binding peptide
YYLVSTASMKTPASSPEPIG

SEQ ID NO: 792 - protein, 20 aa, Artificial Sequence
  Non-cyclic GFR-binding peptide
YYLVSTASLETPASSAKPIS

SEQ ID NO: 793 - protein, 20 aa, Artificial Sequence
  Non-cyclic GFR-binding peptide
YYLVSTASLKTPASTPKTVH

SEQ ID NO: 794 - protein, 20 aa, Artificial Sequence
  Non-cyclic GFR-binding peptide
YYLVSTASLKTPASSPKPVY

SEQ ID NO: 795 - protein, 20 aa, Artificial Sequence
  Non-cyclic GFR-binding peptide
YYLVSTASLQTPASSPKPVT

SEQ ID NO: 796 - protein, 20 aa, Artificial Sequence
  Non-cyclic GFR-binding peptide
YYLVSTASLKTPASSAKGVK

SEQ ID NO: 797 - protein, 20 aa, Artificial Sequence
  Non-cyclic GFR-binding peptide
YYLVSTASLKTPASSAKSAK

SEQ ID NO: 798 - protein, 20 aa, Artificial Sequence
  Non-cyclic GFR-binding peptide
YYLVSTASMKTPASSPGASG

SEQ ID NO: 799 - protein, 20 aa, Artificial Sequence
  Non-cyclic GFR-binding peptide
YYLVSTASLRTPASSSAPAA

SEQ ID NO: 800 - protein, 20 aa, Artificial Sequence
  Non-cyclic GFR-binding peptide
YYLVSTASLRTPASSTPPTS

SEQ ID NO: 801 - protein, 20 aa, Artificial Sequence
  Non-cyclic GFR-binding peptide
YYLVSTASLKTPASSPKPVH

SEQ ID NO: 802 - protein, 20 aa, Artificial Sequence
  Non-cyclic GFR-binding peptide
YYLVSTASLETPVSSAKPIS

SEQ ID NO: 803 - protein, 20 aa, Artificial Sequence
  Non-cyclic GFR-binding peptide
YYLVSTASLKTPVSSAKGVK

SEQ ID NO: 804 - protein, 20 aa, Artificial Sequence
  Non-cyclic GFR-binding peptide
YYLVSTASLKTPVSSAKSAK

SEQ ID NO: 805 - protein, 20 aa, Artificial Sequence
  Non-cyclic GFR-binding peptide
YYLVSTASMKTPTSSPGASG

SEQ ID NO: 806 - protein, 20 aa, Artificial Sequence
  Non-cyclic GFR-binding peptide
YYLVSTASLRAPVSSSAPAA

SEQ ID NO: 807 - protein, 20 aa, Artificial Sequence
  Non-cyclic GFR-binding peptide
YYLVSTASLRTPVSSTPPTS

SEQ ID NO: 808 - protein, 20 aa, Artificial Sequence
  Non-cyclic GFR-binding peptide
YYLVSTASTKVPASSTSPVR

SEQ ID NO: 809 - protein, 20 aa, Artificial Sequence
  Non-cyclic GFR-binding peptide
YYLVSTASLAQPVSSPAASA

SEQ ID NO: 810 - protein, 20 aa, Artificial Sequence
  Non-cyclic GFR-binding peptide
YYLVSTASLDQSVSSPSASA

SEQ ID NO: 811 - protein, 20 aa, Artificial Sequence
  Non-cyclic GFR-binding peptide
YYLVSTASLDQPVSSPSASA

SEQ ID NO: 812 - protein, 20 aa, Artificial Sequence
  Non-cyclic GFR-binding peptide
YYLVSTASEETPVSELGEDN

SEQ ID NO: 813 - protein, 20 aa, Artificial Sequence
  Non-cyclic GFR-binding peptide
YYLVSTASQGTPVSELGEDN

SEQ ID NO: 814 - protein, 20 aa, Artificial Sequence
  Non-cyclic GFR-binding peptide
YYLVSTASHHVRSPQSKVSS

SEQ ID NO: 815 - protein, 20 aa, Artificial Sequence
  Non-cyclic GFR-binding peptide
YYLVSTASLQVQTPRSQVNR

SEQ ID NO: 816 - protein, 20 aa, Artificial Sequence
  Non-cyclic GFR-binding peptide
KYLVSIPSMKTPVSSPEPIG

SEQ ID NO: 817 - protein, 20 aa, Artificial Sequence
  Non-cyclic GFR-binding peptide
KYLVSIPSLETPVSSAKPIS

SEQ ID NO: 818 - protein, 20 aa, Artificial Sequence
  Non-cyclic GFR-binding peptide
KYLVSIPSLKTPVSTPKTVH

SEQ ID NO: 819 - protein, 20 aa, Artificial Sequence
  Non-cyclic GFR-binding peptide
KYLVSIPSLKTPVSSPKPVY

SEQ ID NO: 820 - protein, 20 aa, Artificial Sequence
  Non-cyclic GFR-binding peptide
KYLVSIPSLQTPVSSPKPVT

SEQ ID NO: 821 - protein, 20 aa, Artificial Sequence
  Non-cyclic GFR-binding peptide
KYLVSIPSLKTPVSSAKPVA

SEQ ID NO: 822 - protein, 20 aa, Artificial Sequence
  Non-cyclic GFR-binding peptide
KYLVSIPSLKTPVSSAKSAK

SEQ ID NO: 823 - protein, 20 aa, Artificial Sequence
  Non-cyclic GFR-binding peptide
KYLVSIPSLRTPVSSSAPAA

SEQ ID NO: 824 - protein, 20 aa, Artificial Sequence
  Non-cyclic GFR-binding peptide
KYLVSIPSLRTPVSSTPPTS

SEQ ID NO: 825 - protein, 20 aa, Artificial Sequence
  Non-cyclic GFR-binding peptide
KYLVSIPSTKTPVSSTSPVR

SEQ ID NO: 826 - protein, 20 aa, Artificial Sequence
  Non-cyclic GFR-binding peptide
KYLVSIPSLATPVSSPAASA

SEQ ID NO: 827 - protein, 20 aa, Artificial Sequence
  Non-cyclic GFR-binding peptide
KYLVSIPSLDTPVSSPSASA

SEQ ID NO: 828 - protein, 20 aa, Artificial Sequence
  Non-cyclic GFR-binding peptide
KYLVSIPSMKEPVSSPEPIG

SEQ ID NO: 829 - protein, 20 aa, Artificial Sequence
  Non-cyclic GFR-binding peptide
KYLVSIPSLKTPASTPKTVH

SEQ ID NO: 830 - protein, 20 aa, Artificial Sequence
  Non-cyclic GFR-binding peptide
KYLVSIPSLKTPASSPKPVY

SEQ ID NO: 831 - protein, 20 aa, Artificial Sequence
  Non-cyclic GFR-binding peptide
KYLVSIPSLQTPASSPKPVT

SEQ ID NO: 832 - protein, 20 aa, Artificial Sequence
  Non-cyclic GFR-binding peptide
KYLVSIPSLKTPASSAKPVA

SEQ ID NO: 833 - protein, 20 aa, Artificial Sequence
  Non-cyclic GFR-binding peptide
KYLVSIPSMKTPTSSPGASG

SEQ ID NO: 834 - protein, 20 aa, Artificial Sequence
  Non-cyclic GFR-binding peptide
KYLVSIPSLRAPVSSSAPAA

SEQ ID NO: 835 - protein, 20 aa, Artificial Sequence
  Non-cyclic GFR-binding peptide
KYLVSIPSLKTPASSPKPVH

SEQ ID NO: 836 - protein, 20 aa, Artificial Sequence
  Non-cyclic GFR-binding peptide
KYLVSIPSTKVPASSTSPVR

SEQ ID NO: 837 - protein, 20 aa, Artificial Sequence
  Non-cyclic GFR-binding peptide
KYLVSIPSLAQPVSSPAASA

SEQ ID NO: 838 - protein, 20 aa, Artificial Sequence
  Non-cyclic GFR-binding peptide
KYLVSIPSLDQSVSSPSASA

SEQ ID NO: 839 - protein, 20 aa, Artificial Sequence
  Non-cyclic GFR-binding peptide
KYLVSIPSLDQPVSSPSASA

SEQ ID NO: 840 - protein, 20 aa, Artificial Sequence
  Non-cyclic GFR-binding peptide
KYLVSIPSHHVRSPQSKVSS

SEQ ID NO: 841 - protein, 20 aa, Artificial Sequence
  Non-cyclic GFR-binding peptide
KYLVSIPSLQVQTPRSQVNR

SEQ ID NO: 842 - protein, 20 aa, Artificial Sequence
  Non-cyclic GFR-binding peptide
LYLISIPELETPVSSAKPIK

SEQ ID NO: 843 - protein, 20 aa, Artificial Sequence
  Non-cyclic GFR-binding peptide
LYLISIPEMKTPVSSPEPIG

SEQ ID NO: 844 - protein, 20 aa, Artificial Sequence
  Non-cyclic GFR-binding peptide
LYLISIPELETPVSSAKPIS

SEQ ID NO: 845 - protein, 20 aa, Artificial Sequence
  Non-cyclic GFR-binding peptide
LYLISIPELKTPVSTPKTVH

SEQ ID NO: 846 - protein, 20 aa, Artificial Sequence
  Non-cyclic GFR-binding peptide
LYLISIPELKTPVSSPKPVY

SEQ ID NO: 847 - protein, 20 aa, Artificial Sequence
  Non-cyclic GFR-binding peptide
LYLISIPELQTPVSSPKPVT

SEQ ID NO: 848 - protein, 20 aa, Artificial Sequence
  Non-cyclic GFR-binding peptide
LYLISIPELKTPVSSAKPVA

SEQ ID NO: 849 - protein, 20 aa, Artificial Sequence
  Non-cyclic GFR-binding peptide
LYLISIPEMKTPVSSPGASG

SEQ ID NO: 850 - protein, 20 aa, Artificial Sequence
  Non-cyclic GFR-binding peptide
LYLISIPELRTPVSSSAPAA

SEQ ID NO: 851 - protein, 20 aa, Artificial Sequence
  Non-cyclic GFR-binding peptide
LYLISIPELRTPVSSTPPTS

SEQ ID NO: 852 - protein, 20 aa, Artificial Sequence
  Non-cyclic GFR-binding peptide
LYLISIPELKTPVSSPKPVH

SEQ ID NO: 853 - protein, 20 aa, Artificial Sequence
  Non-cyclic GFR-binding peptide
LYLISIPETKTPVSSTSPVR

SEQ ID NO: 854 - protein, 20 aa, Artificial Sequence
  Non-cyclic GFR-binding peptide
LYLISIPELATPVSSPAASA

SEQ ID NO: 855 - protein, 20 aa, Artificial Sequence
  Non-cyclic GFR-binding peptide
LYLISIPELDTPVSSPSASA

SEQ ID NO: 856 - protein, 20 aa, Artificial Sequence
  Non-cyclic GFR-binding peptide
LYLISIPEMKEPVSSPEPIG

SEQ ID NO: 857 - protein, 20 aa, Artificial Sequence
  Non-cyclic GFR-binding peptide
LYLISIPELKTPASTPKTVH

SEQ ID NO: 858 - protein, 20 aa, Artificial Sequence
  Non-cyclic GFR-binding peptide
LYLISIPELKTPASSPKPVY

SEQ ID NO: 859 - protein, 20 aa, Artificial Sequence
  Non-cyclic GFR-binding peptide
LYLISIPELQTPASSPKPVT

SEQ ID NO: 860 - protein, 20 aa, Artificial Sequence
  Non-cyclic GFR-binding peptide
LYLISIPEMKTPTSSPGASG

SEQ ID NO: 861 - protein, 20 aa, Artificial Sequence
  Non-cyclic GFR-binding peptide
LYLISIPELRAPVSSSAPAA

SEQ ID NO: 862 - protein, 20 aa, Artificial Sequence
  Non-cyclic GFR-binding peptide
LYLISIPELAQPVSSPAASA

SEQ ID NO: 863 - protein, 20 aa, Artificial Sequence
  Non-cyclic GFR-binding peptide
LYLISIPELDQSVSSPSASA

SEQ ID NO: 864 - protein, 20 aa, Artificial Sequence
  Non-cyclic GFR-binding peptide
LYLISIPELDQPVSSPSASA

SEQ ID NO: 865 - protein, 20 aa, Artificial Sequence
  Non-cyclic GFR-binding peptide
LYLISIPEHHVRSPQSKVSS

SEQ ID NO: 866 - protein, 20 aa, Artificial Sequence
  Non-cyclic GFR-binding peptide
LYLISIPELQVQTPRSQVNR

SEQ ID NO: 867 - protein, 20 aa, Artificial Sequence
  Non-cyclic GFR-binding peptide
FYLMNIPSLKTPTSTPKTVH

SEQ ID NO: 868 - protein, 20 aa, Artificial Sequence
  Non-cyclic GFR-binding peptide
FYLMNIPSLQTPTSSPKPVT

SEQ ID NO: 869 - protein, 20 aa, Artificial Sequence
  Non-cyclic GFR-binding peptide
FYLMNIPSLKTPTSSAKPVA

SEQ ID NO: 870 - protein, 20 aa, Artificial Sequence
  Non-cyclic GFR-binding peptide
FYLMNIPSLKTPTSSAKGVK

SEQ ID NO: 871 - protein, 20 aa, Artificial Sequence
  Non-cyclic GFR-binding peptide
FYLMNIPSLKTPTSSAKSAK

SEQ ID NO: 872 - protein, 20 aa, Artificial Sequence
  Non-cyclic GFR-binding peptide
FYLMNIPSLRTPTSSSAPAA

SEQ ID NO: 873 - protein, 20 aa, Artificial Sequence
  Non-cyclic GFR-binding peptide
FYLMNIPSLRTPTSSTPPTS

SEQ ID NO: 874 - protein, 20 aa, Artificial Sequence
  Non-cyclic GFR-binding peptide
FYLMNIPSLKTPTSSPKPVH

SEQ ID NO: 875 - protein, 20 aa, Artificial Sequence
  Non-cyclic GFR-binding peptide
FYLMNIPSTKTPTSSTSPVR

SEQ ID NO: 876 - protein, 20 aa, Artificial Sequence
  Non-cyclic GFR-binding peptide
FYLMNIPSLATPTSSPAASA

SEQ ID NO: 877 - protein, 20 aa, Artificial Sequence
  Non-cyclic GFR-binding peptide
FYLMNIPSLDTPTSSPSASA

SEQ ID NO: 878 - protein, 20 aa, Artificial Sequence
  Non-cyclic GFR-binding peptide
FYLMNIPSLETPVSSAKPIK

SEQ ID NO: 879 - protein, 20 aa, Artificial Sequence
  Non-cyclic GFR-binding peptide
FYLMNIPSMKEPVSSPEPIG

SEQ ID NO: 880 - protein, 20 aa, Artificial Sequence
  Non-cyclic GFR-binding peptide
FYLMNIPSLETPVSSAKPIS

SEQ ID NO: 881 - protein, 20 aa, Artificial Sequence
  Non-cyclic GFR-binding peptide
FYLMNIPSLKTPASTPKTVH

SEQ ID NO: 882 - protein, 20 aa, Artificial Sequence
  Non-cyclic GFR-binding peptide
FYLMNIPSLKTPASSPKPVY

SEQ ID NO: 883 - protein, 20 aa, Artificial Sequence
  Non-cyclic GFR-binding peptide
FYLMNIPSLQTPASSPKPVT

SEQ ID NO: 884 - protein, 20 aa, Artificial Sequence
  Non-cyclic GFR-binding peptide
FYLMNIPSLKTPASSAKPVA

SEQ ID NO: 885 - protein, 20 aa, Artificial Sequence
  Non-cyclic GFR-binding peptide
FYLMNIPSLKTPVSSAKGVK

SEQ ID NO: 886 - protein, 20 aa, Artificial Sequence
  Non-cyclic GFR-binding peptide
FYLMNIPSLKTPVSSAKSAK

SEQ ID NO: 887 - protein, 20 aa, Artificial Sequence
  Non-cyclic GFR-binding peptide
FYLMNIPSLRAPVSSSAPAA

SEQ ID NO: 888 - protein, 20 aa, Artificial Sequence
  Non-cyclic GFR-binding peptide
FYLMNIPSLRTPVSSTPPTS

SEQ ID NO: 889 - protein, 20 aa, Artificial Sequence
  Non-cyclic GFR-binding peptide
FYLMNIPSLKTPASSPKPVH

SEQ ID NO: 890 - protein, 20 aa, Artificial Sequence
  Non-cyclic GFR-binding peptide
FYLMNIPSTKVPASSTSPVR

SEQ ID NO: 891 - protein, 20 aa, Artificial Sequence
  Non-cyclic GFR-binding peptide
FYLMNIPSLAQPVSSPAASA

SEQ ID NO: 892 - protein, 20 aa, Artificial Sequence
  Non-cyclic GFR-binding peptide
FYLMNIPSLDQSVSSPSASA

SEQ ID NO: 893 - protein, 20 aa, Artificial Sequence
  Non-cyclic GFR-binding peptide
FYLMNIPSLDQPVSSPSASA

SEQ ID NO: 894 - protein, 20 aa, Artificial Sequence
  Non-cyclic GFR-binding peptide
FYLMNIPSEETPVSELGEDN

SEQ ID NO: 895 - protein, 20 aa, Artificial Sequence
  Non-cyclic GFR-binding peptide
FYLMNIPSQGTPVSELGEDN

SEQ ID NO: 896 - protein, 20 aa, Artificial Sequence
  Non-cyclic GFR-binding peptide
FYLMNIPSHHVRSPQSKVSS

SEQ ID NO: 897 - protein, 20 aa, Artificial Sequence
  Non-cyclic GFR-binding peptide
FYLMNIPSLQVQTPRSQVNR

SEQ ID NO: 898 - protein, 20 aa, Artificial Sequence
  Non-cyclic GFR-binding peptide
IYLISIPSLEAPVSSAKPIK

SEQ ID NO: 899 - protein, 20 aa, Artificial Sequence
  Non-cyclic GFR-binding peptide
IYLISIPSLEAPVSSAKPIS

SEQ ID NO: 900 - protein, 20 aa, Artificial Sequence
  Non-cyclic GFR-binding peptide
IYLISIPSLKAPVSTPKTVH

SEQ ID NO: 901 - protein, 20 aa, Artificial Sequence
  Non-cyclic GFR-binding peptide
IYLISIPSLKAPVSSPKPVY

SEQ ID NO: 902 - protein, 20 aa, Artificial Sequence
  Non-cyclic GFR-binding peptide
IYLISIPSLQAPVSSPKPVT

SEQ ID NO: 903 - protein, 20 aa, Artificial Sequence
  Non-cyclic GFR-binding peptide
IYLISIPSLKAPVSSAKPVA

SEQ ID NO: 904 - protein, 20 aa, Artificial Sequence
  Non-cyclic GFR-binding peptide
IYLISIPSLKAPVSSAKGVK

SEQ ID NO: 905 - protein, 20 aa, Artificial Sequence
  Non-cyclic GFR-binding peptide
IYLISIPSLKAPVSSAKSAK

SEQ ID NO: 906 - protein, 20 aa, Artificial Sequence
  Non-cyclic GFR-binding peptide
IYLISIPSMKAPVSSPGASG

SEQ ID NO: 907 - protein, 20 aa, Artificial Sequence
  Non-cyclic GFR-binding peptide
IYLISIPSLRAPVSSTPPTS

SEQ ID NO: 908 - protein, 20 aa, Artificial Sequence
  Non-cyclic GFR-binding peptide
IYLISIPSLKAPVSSPKPVH

SEQ ID NO: 909 - protein, 20 aa, Artificial Sequence
  Non-cyclic GFR-binding peptide
IYLISIPSLDAPVSSPSASA

SEQ ID NO: 910 - protein, 20 aa, Artificial Sequence
  Non-cyclic GFR-binding peptide
IYLISIPSLETPVSSAKPIK

SEQ ID NO: 911 - protein, 20 aa, Artificial Sequence
  Non-cyclic GFR-binding peptide
IYLISIPSLETPVSSAKPIS

SEQ ID NO: 912 - protein, 20 aa, Artificial Sequence
  Non-cyclic GFR-binding peptide
IYLISIPSLKTPASTPKTVH

SEQ ID NO: 913 - protein, 20 aa, Artificial Sequence
  Non-cyclic GFR-binding peptide
IYLISIPSLKTPASSPKPVY

SEQ ID NO: 914 - protein, 20 aa, Artificial Sequence
  Non-cyclic GFR-binding peptide
IYLISIPSLKTPASSAKPVA

SEQ ID NO: 915 - protein, 20 aa, Artificial Sequence
  Non-cyclic GFR-binding peptide
IYLISIPSLKTPVSSAKGVK

SEQ ID NO: 916 - protein, 20 aa, Artificial Sequence
  Non-cyclic GFR-binding peptide
IYLISIPSLKTPVSSAKSAK

SEQ ID NO: 917 - protein, 20 aa, Artificial Sequence
  Non-cyclic GFR-binding peptide
IYLISIPSMKTPTSSPGASG

SEQ ID NO: 918 - protein, 20 aa, Artificial Sequence
  Non-cyclic GFR-binding peptide
IYLISIPSLRTPVSSTPPTS

SEQ ID NO: 919 - protein, 20 aa, Artificial Sequence
  Non-cyclic GFR-binding peptide
IYLISIPSLKTPASSPKPVH

SEQ ID NO: 920 - protein, 20 aa, Artificial Sequence
  Non-cyclic GFR-binding peptide
IYLISIPSTKVPASSTSPVR

SEQ ID NO: 921 - protein, 20 aa, Artificial Sequence
  Non-cyclic GFR-binding peptide
IYLISIPSLAQPVSSPAASA

SEQ ID NO: 922 - protein, 20 aa, Artificial Sequence
  Non-cyclic GFR-binding peptide
IYLISIPSLDQSVSSPSASA

SEQ ID NO: 923 - protein, 20 aa, Artificial Sequence
  Non-cyclic GFR-binding peptide
IYLISIPSLDQPVSSPSASA

SEQ ID NO: 924 - protein, 20 aa, Artificial Sequence
  Non-cyclic GFR-binding peptide
IYLISIPSQGTPVSELGEDN

SEQ ID NO: 925 - protein, 20 aa, Artificial Sequence
  Non-cyclic GFR-binding peptide
IYLISIPSHHVRSPQSKVSS

SEQ ID NO: 926 - protein, 20 aa, Artificial Sequence
  Non-cyclic GFR-binding peptide
IYLISIPSLQVQTPRSQVNR

SEQ ID NO: 927 - protein, 20 aa, Artificial Sequence
  Non-cyclic GFR-binding peptide
IFLISIPSLETPVSSAKPIK

SEQ ID NO: 928 - protein, 20 aa, Artificial Sequence
  Non-cyclic GFR-binding peptide
IFLISIPSMKTPVSSPEPIG

SEQ ID NO: 929 - protein, 20 aa, Artificial Sequence
  Non-cyclic GFR-binding peptide
IFLISIPSLETPVSSAKPIS

SEQ ID NO: 930 - protein, 20 aa, Artificial Sequence
  Non-cyclic GFR-binding peptide
IFLISIPSLKTPVSTPKTVH

SEQ ID NO: 931 - protein, 20 aa, Artificial Sequence
  Non-cyclic GFR-binding peptide
IFLISIPSLKTPVSSPKPVY

SEQ ID NO: 932 - protein, 20 aa, Artificial Sequence
  Non-cyclic GFR-binding peptide
IFLISIPSLQTPVSSPKPVT

SEQ ID NO: 933 - protein, 20 aa, Artificial Sequence
  Non-cyclic GFR-binding peptide
IFLISIPSLKTPVSSAKPVA

SEQ ID NO: 934 - protein, 20 aa, Artificial Sequence
  Non-cyclic GFR-binding peptide
IFLISIPSLKTPVSSAKGVK

SEQ ID NO: 935 - protein, 20 aa, Artificial Sequence
  Non-cyclic GFR-binding peptide
IFLISIPSLKTPVSSAKSAK

SEQ ID NO: 936 - protein, 20 aa, Artificial Sequence
  Non-cyclic GFR-binding peptide
IFLISIPSMKTPVSSPGASG

SEQ ID NO: 937 - protein, 20 aa, Artificial Sequence
  Non-cyclic GFR-binding peptide
IFLISIPSLRTPVSSSAPAA

SEQ ID NO: 938 - protein, 20 aa, Artificial Sequence
  Non-cyclic GFR-binding peptide
IFLISIPSLKTPVSSPKPVH

SEQ ID NO: 939 - protein, 20 aa, Artificial Sequence
  Non-cyclic GFR-binding peptide
IFLISIPSTKTPVSSTSPVR

SEQ ID NO: 940 - protein, 20 aa, Artificial Sequence
  Non-cyclic GFR-binding peptide
IFLISIPSLATPVSSPAASA

SEQ ID NO: 941 - protein, 20 aa, Artificial Sequence
  Non-cyclic GFR-binding peptide
IFLISIPSLDTPVSSPSASA

SEQ ID NO: 942 - protein, 20 aa, Artificial Sequence
  Non-cyclic GFR-binding peptide
IFLISIPSMKEPVSSPEPIG

SEQ ID NO: 943 - protein, 20 aa, Artificial Sequence
  Non-cyclic GFR-binding peptide
IFLISIPSLKTPASTPKTVH

SEQ ID NO: 944 - protein, 20 aa, Artificial Sequence
  Non-cyclic GFR-binding peptide
IFLISIPSLKTPASSPKPVY

SEQ ID NO: 945 - protein, 20 aa, Artificial Sequence
  Non-cyclic GFR-binding peptide
IFLISIPSLQTPASSPKPVT

SEQ ID NO: 946 - protein, 20 aa, Artificial Sequence
  Non-cyclic GFR-binding peptide
IFLISIPSLKTPASSAKPVA

SEQ ID NO: 947 - protein, 20 aa, Artificial Sequence
  Non-cyclic GFR-binding peptide
IFLISIPSMKTPTSSPGASG

SEQ ID NO: 948 - protein, 20 aa, Artificial Sequence
  Non-cyclic GFR-binding peptide
IFLISIPSLRAPVSSSAPAA

SEQ ID NO: 949 - protein, 20 aa, Artificial Sequence
  Non-cyclic GFR-binding peptide
IFLISIPSLKTPASSPKPVH

SEQ ID NO: 950 - protein, 20 aa, Artificial Sequence
  Non-cyclic GFR-binding peptide
IFLISIPSTKVPASSTSPVR

SEQ ID NO: 951 - protein, 20 aa, Artificial Sequence
  Non-cyclic GFR-binding peptide
IFLISIPSLAQPVSSPAASA

SEQ ID NO: 952 - protein, 20 aa, Artificial Sequence
  Non-cyclic GFR-binding peptide
IFLISIPSLDQSVSSPSASA

SEQ ID NO: 953 - protein, 20 aa, Artificial Sequence
  Non-cyclic GFR-binding peptide
IFLISIPSLDQPVSSPSASA

SEQ ID NO: 954 - protein, 20 aa, Artificial Sequence
  Non-cyclic GFR-binding peptide
VYLMSLPKLEVPASSAKPIK

SEQ ID NO: 955 - protein, 20 aa, Artificial Sequence
  Non-cyclic GFR-binding peptide
VYLMSLPKMKVPASSPEPIG

SEQ ID NO: 956 - protein, 20 aa, Artificial Sequence
  Non-cyclic GFR-binding peptide
VYLMSLPKLEVPASSAKPIS

SEQ ID NO: 957 - protein, 20 aa, Artificial Sequence
  Non-cyclic GFR-binding peptide
VYLMSLPKLKVPASTPKTVH

SEQ ID NO: 958 - protein, 20 aa, Artificial Sequence
  Non-cyclic GFR-binding peptide
VYLMSLPKLKVPASSPKPVY

SEQ ID NO: 959 - protein, 20 aa, Artificial Sequence
  Non-cyclic GFR-binding peptide
VYLMSLPKLQVPASSPKPVT

SEQ ID NO: 960 - protein, 20 aa, Artificial Sequence
  Non-cyclic GFR-binding peptide
VYLMSLPKLKVPASSAKPVA

SEQ ID NO: 961 - protein, 20 aa, Artificial Sequence
  Non-cyclic GFR-binding peptide
VYLMSLPKLKVPASSAKGVK

SEQ ID NO: 962 - protein, 20 aa, Artificial Sequence
  Non-cyclic GFR-binding peptide
VYLMSLPKLKVPASSAKSAK

SEQ ID NO: 963 - protein, 20 aa, Artificial Sequence
  Non-cyclic GFR-binding peptide
VYLMSLPKMKVPASSPGASG

SEQ ID NO: 964 - protein, 20 aa, Artificial Sequence
  Non-cyclic GFR-binding peptide
VYLMSLPKLRVPASSSAPAA

SEQ ID NO: 965 - protein, 20 aa, Artificial Sequence
  Non-cyclic GFR-binding peptide
VYLMSLPKLRVPASSTPPTS

SEQ ID NO: 966 - protein, 20 aa, Artificial Sequence
  Non-cyclic GFR-binding peptide
VYLMSLPKLKVPASSPKPVH

SEQ ID NO: 967 - protein, 20 aa, Artificial Sequence
  Non-cyclic GFR-binding peptide
VYLMSLPKLAVPASSPAASA

SEQ ID NO: 968 - protein, 20 aa, Artificial Sequence
  Non-cyclic GFR-binding peptide
VYLMSLPKLDVPASSPSASA

SEQ ID NO: 969 - protein, 20 aa, Artificial Sequence
  Non-cyclic GFR-binding peptide
VYLMSLPKLETPVSSAKPIK

SEQ ID NO: 970 - protein, 20 aa, Artificial Sequence
  Non-cyclic GFR-binding peptide
VYLMSLPKMKEPVSSPEPIG

SEQ ID NO: 971 - protein, 20 aa, Artificial Sequence
  Non-cyclic GFR-binding peptide
VYLMSLPKLETPVSSAKPIS

SEQ ID NO: 972 - protein, 20 aa, Artificial Sequence
  Non-cyclic GFR-binding peptide
VYLMSLPKLKTPASTPKTVH

SEQ ID NO: 973 - protein, 20 aa, Artificial Sequence
  Non-cyclic GFR-binding peptide
VYLMSLPKLKTPASSPKPVY

SEQ ID NO: 974 - protein, 20 aa, Artificial Sequence
  Non-cyclic GFR-binding peptide
VYLMSLPKLQTPASSPKPVT

SEQ ID NO: 975 - protein, 20 aa, Artificial Sequence
  Non-cyclic GFR-binding peptide
VYLMSLPKLKTPASSAKPVA

SEQ ID NO: 976 - protein, 20 aa, Artificial Sequence
  Non-cyclic GFR-binding peptide
VYLMSLPKLKTPVSSAKGVK

SEQ ID NO: 977 - protein, 20 aa, Artificial Sequence
  Non-cyclic GFR-binding peptide
VYLMSLPKLKTPVSSAKSAK

SEQ ID NO: 978 - protein, 20 aa, Artificial Sequence
  Non-cyclic GFR-binding peptide
VYLMSLPKMKTPTSSPGASG

SEQ ID NO: 979 - protein, 20 aa, Artificial Sequence
  Non-cyclic GFR-binding peptide
VYLMSLPKLRAPVSSSAPAA

SEQ ID NO: 980 - protein, 20 aa, Artificial Sequence
  Non-cyclic GFR-binding peptide
VYLMSLPKLRTPVSSTPPTS

SEQ ID NO: 981 - protein, 20 aa, Artificial Sequence
  Non-cyclic GFR-binding peptide
VYLMSLPKLKTPASSPKPVH

SEQ ID NO: 982 - protein, 20 aa, Artificial Sequence
  Non-cyclic GFR-binding peptide
VYLMSLPKLAQPVSSPAASA

SEQ ID NO: 983 - protein, 20 aa, Artificial Sequence
  Non-cyclic GFR-binding peptide
VYLMSLPKLDQSVSSPSASA

SEQ ID NO: 984 - protein, 20 aa, Artificial Sequence
  Non-cyclic GFR-binding peptide
VYLMSLPKLDQPVSSPSASA

SEQ ID NO: 985 - protein, 20 aa, Artificial Sequence
  Non-cyclic GFR-binding peptide
VYLMSLPKEETPVSELGEDN

SEQ ID NO: 986 - protein, 20 aa, Artificial Sequence
  Non-cyclic GFR-binding peptide
VYLMSLPKQGTPVSELGEDN

SEQ ID NO: 987 - protein, 20 aa, Artificial Sequence
  Non-cyclic GFR-binding peptide
YYVIPLPELKQPVSTPKTVH

SEQ ID NO: 988 - protein, 20 aa, Artificial Sequence
  Non-cyclic GFR-binding peptide
YYVIPLPELKQPVSSPKPVY

SEQ ID NO: 989 - protein, 20 aa, Artificial Sequence
  Non-cyclic GFR-binding peptide
YYVIPLPELQQPVSSPKPVT

SEQ ID NO: 990 - protein, 20 aa, Artificial Sequence
  Non-cyclic GFR-binding peptide
YYVIPLPELKQPVSSAKPVA

SEQ ID NO: 991 - protein, 20 aa, Artificial Sequence
  Non-cyclic GFR-binding peptide
YYVIPLPEMKQPVSSPGASG

SEQ ID NO: 992 - protein, 20 aa, Artificial Sequence
  Non-cyclic GFR-binding peptide
YYVIPLPELRQPVSSSAPAA

SEQ ID NO: 993 - protein, 20 aa, Artificial Sequence
  Non-cyclic GFR-binding peptide
YYVIPLPELRQPVSSTPPTS

SEQ ID NO: 994 - protein, 20 aa, Artificial Sequence
  Non-cyclic GFR-binding peptide
YYVIPLPELKQPVSSPKPVH

SEQ ID NO: 995 - protein, 20 aa, Artificial Sequence
  Non-cyclic GFR-binding peptide
YYVIPLPETKQPVSSTSPVR

SEQ ID NO: 996 - protein, 20 aa, Artificial Sequence
  Non-cyclic GFR-binding peptide
YYVIPLPELDQPVSSPSASA

SEQ ID NO: 997 - protein, 20 aa, Artificial Sequence
  Non-cyclic GFR-binding peptide
YYVIPLPEMKEPVSSPEPIG

SEQ ID NO: 998 - protein, 20 aa, Artificial Sequence
  Non-cyclic GFR-binding peptide
YYVIPLPELETPVSSAKPIS

SEQ ID NO: 999 - protein, 20 aa, Artificial Sequence
  Non-cyclic GFR-binding peptide
YYVIPLPELKTPASTPKTVH

SEQ ID NO: 1000 - protein, 20 aa, Artificial Sequence
  Non-cyclic GFR-binding peptide
YYVIPLPELKTPASSPKPVY

SEQ ID NO: 1001 - protein, 20 aa, Artificial Sequence
  Non-cyclic GFR-binding peptide
YYVIPLPELQTPASSPKPVT

SEQ ID NO: 1002 - protein, 20 aa, Artificial Sequence
  Non-cyclic GFR-binding peptide
YYVIPLPELKTPVSSAKGVK

SEQ ID NO: 1003 - protein, 20 aa, Artificial Sequence
  Non-cyclic GFR-binding peptide
YYVIPLPELKTPVSSAKSAK

SEQ ID NO: 1004 - protein, 20 aa, Artificial Sequence
  Non-cyclic GFR-binding peptide
YYVIPLPEMKTPTSSPGASG

SEQ ID NO: 1005 - protein, 20 aa, Artificial Sequence
  Non-cyclic GFR-binding peptide
YYVIPLPELRAPVSSSAPAA

SEQ ID NO: 1006 - protein, 20 aa, Artificial Sequence
  Non-cyclic GFR-binding peptide
YYVIPLPELRTPVSSTPPTS

SEQ ID NO: 1007 - protein, 20 aa, Artificial Sequence
  Non-cyclic GFR-binding peptide
YYVIPLPELKTPASSPKPVH

SEQ ID NO: 1008 - protein, 20 aa, Artificial Sequence
  Non-cyclic GFR-binding peptide
YYVIPLPETKVPASSTSPVR

SEQ ID NO: 1009 - protein, 20 aa, Artificial Sequence
  Non-cyclic GFR-binding peptide
YYVIPLPELDQSVSSPSASA

SEQ ID NO: 1010 - protein, 20 aa, Artificial Sequence
  Non-cyclic GFR-binding peptide
YYVIPLPEEETPVSELGEDN

SEQ ID NO: 1011 - protein, 20 aa, Artificial Sequence
  Non-cyclic GFR-binding peptide
YYVIPLPEQGTPVSELGEDN

SEQ ID NO: 1012 - protein, 20 aa, Artificial Sequence
  Non-cyclic GFR-binding peptide
YYVIPLPEHHVRSPQSKVSS

SEQ ID NO: 1013 - protein, 20 aa, Artificial Sequence
  Non-cyclic GFR-binding peptide
YYVIPLPELQVQTPRSQVNR

SEQ ID NO: 1014 - protein, 20 aa, Artificial Sequence
  Non-cyclic GFR-binding peptide
YYLITLPEMKQSVSSPEPIG

SEQ ID NO: 1015 - protein, 20 aa, Artificial Sequence
  Non-cyclic GFR-binding peptide
YYLITLPELEQSVSSAKPIS

SEQ ID NO: 1016 - protein, 20 aa, Artificial Sequence
  Non-cyclic GFR-binding peptide
YYLITLPELKQSVSTPKTVH

SEQ ID NO: 1017 - protein, 20 aa, Artificial Sequence
  Non-cyclic GFR-binding peptide
YYLITLPELKQSVSSPKPVY

SEQ ID NO: 1018 - protein, 20 aa, Artificial Sequence
  Non-cyclic GFR-binding peptide
YYLITLPELQQSVSSPKPVT

SEQ ID NO: 1019 - protein, 20 aa, Artificial Sequence
  Non-cyclic GFR-binding peptide
YYLITLPELKQSVSSAKPVA

SEQ ID NO: 1020 - protein, 20 aa, Artificial Sequence
  Non-cyclic GFR-binding peptide
YYLITLPELKQSVSSAKSAK

SEQ ID NO: 1021 - protein, 20 aa, Artificial Sequence
  Non-cyclic GFR-binding peptide
YYLITLPEMKQSVSSPGASG

SEQ ID NO: 1022 - protein, 20 aa, Artificial Sequence
  Non-cyclic GFR-binding peptide
YYLITLPELRQSVSSSAPAA

SEQ ID NO: 1023 - protein, 20 aa, Artificial Sequence
  Non-cyclic GFR-binding peptide
YYLITLPELRQSVSSTPPTS

SEQ ID NO: 1024 - protein, 20 aa, Artificial Sequence
  Non-cyclic GFR-binding peptide
YYLITLPELKQSVSSPKPVH

SEQ ID NO: 1025 - protein, 20 aa, Artificial Sequence
  Non-cyclic GFR-binding peptide
YYLITLPETKQSVSSTSPVR

SEQ ID NO: 1026 - protein, 20 aa, Artificial Sequence
  Non-cyclic GFR-binding peptide
YYLITLPELAQSVSSPAASA

SEQ ID NO: 1027 - protein, 20 aa, Artificial Sequence
  Non-cyclic GFR-binding peptide
YYLITLPELETPVSSAKPIK

SEQ ID NO: 1028 - protein, 20 aa, Artificial Sequence
  Non-cyclic GFR-binding peptide
YYLITLPEMKEPVSSPEPIG

SEQ ID NO: 1029 - protein, 20 aa, Artificial Sequence
  Non-cyclic GFR-binding peptide
YYLITLPELETPVSSAKPIS

SEQ ID NO: 1030 - protein, 20 aa, Artificial Sequence
  Non-cyclic GFR-binding peptide
YYLITLPELKTPASTPKTVH

SEQ ID NO: 1031 - protein, 20 aa, Artificial Sequence
  Non-cyclic GFR-binding peptide
YYLITLPELKTPASSPKPVY

SEQ ID NO: 1032 - protein, 20 aa, Artificial Sequence
  Non-cyclic GFR-binding peptide
YYLITLPELQTPASSPKPVT

SEQ ID NO: 1033 - protein, 20 aa, Artificial Sequence
  Non-cyclic GFR-binding peptide
YYLITLPELKTPASSAKPVA

SEQ ID NO: 1034 - protein, 20 aa, Artificial Sequence
  Non-cyclic GFR-binding peptide
YYLITLPELKTPVSSAKSAK

SEQ ID NO: 1035 - protein, 20 aa, Artificial Sequence
  Non-cyclic GFR-binding peptide
YYLITLPEMKTPTSSPGASG

SEQ ID NO: 1036 - protein, 20 aa, Artificial Sequence
  Non-cyclic GFR-binding peptide
YYLITLPELRAPVSSSAPAA

SEQ ID NO: 1037 - protein, 20 aa, Artificial Sequence
  Non-cyclic GFR-binding peptide
YYLITLPELRTPVSSTPPTS

SEQ ID NO: 1038 - protein, 20 aa, Artificial Sequence
  Non-cyclic GFR-binding peptide
YYLITLPELKTPASSPKPVH

SEQ ID NO: 1039 - protein, 20 aa, Artificial Sequence
  Non-cyclic GFR-binding peptide
YYLITLPETKVPASSTSPVR

SEQ ID NO: 1040 - protein, 20 aa, Artificial Sequence
  Non-cyclic GFR-binding peptide
YYLITLPEQGTPVSELGEDN

SEQ ID NO: 1041 - protein, 20 aa, Artificial Sequence
  Non-cyclic GFR-binding peptide
YYLITLPEHHVRSPQSKVSS

SEQ ID NO: 1042 - protein, 20 aa, Artificial Sequence
  Non-cyclic GFR-binding peptide
YYLITLPELQVQTPRSQVNR

SEQ ID NO: 1043 - protein, 20 aa, Artificial Sequence
  Non-cyclic GFR-binding peptide
YYLITLPELEQPVSSAKPIK

SEQ ID NO: 1044 - protein, 20 aa, Artificial Sequence
  Non-cyclic GFR-binding peptide
YYLITLPEMKQPVSSPEPIG

SEQ ID NO: 1045 - protein, 20 aa, Artificial Sequence
  Non-cyclic GFR-binding peptide
YYLITLPELEQPVSSAKPIS

SEQ ID NO: 1046 - protein, 20 aa, Artificial Sequence
  Non-cyclic GFR-binding peptide
YYLITLPELKQPVSTPKTVH

SEQ ID NO: 1047 - protein, 20 aa, Artificial Sequence
  Non-cyclic GFR-binding peptide
YYLITLPELKQPVSSPKPVY

SEQ ID NO: 1048 - protein, 20 aa, Artificial Sequence
  Non-cyclic GFR-binding peptide
YYLITLPELQQPVSSPKPVT

SEQ ID NO: 1049 - protein, 20 aa, Artificial Sequence
  Non-cyclic GFR-binding peptide
YYLITLPELKQPVSSAKPVA

SEQ ID NO: 1050 - protein, 20 aa, Artificial Sequence
  Non-cyclic GFR-binding peptide
YYLITLPELKQPVSSAKGVK

SEQ ID NO: 1051 - protein, 20 aa, Artificial Sequence
  Non-cyclic GFR-binding peptide
YYLITLPELKQPVSSAKSAK

SEQ ID NO: 1052 - protein, 20 aa, Artificial Sequence
  Non-cyclic GFR-binding peptide
YYLITLPEMKQPVSSPGASG

SEQ ID NO: 1053 - protein, 20 aa, Artificial Sequence
  Non-cyclic GFR-binding peptide
YYLITLPELRQPVSSSAPAA

SEQ ID NO: 1054 - protein, 20 aa, Artificial Sequence
  Non-cyclic GFR-binding peptide
YYLITLPELRQPVSSTPPTS

SEQ ID NO: 1055 - protein, 20 aa, Artificial Sequence
  Non-cyclic GFR-binding peptide
YYLITLPELKQPVSSPKPVH

SEQ ID NO: 1056 - protein, 20 aa, Artificial Sequence
  Non-cyclic GFR-binding peptide
YYLITLPETKQPVSSTSPVR

SEQ ID NO: 1057 - protein, 20 aa, Artificial Sequence
  Non-cyclic GFR-binding peptide
MIQMTINSQGTPVSELGEDN

SEQ ID NO: 1058 - protein, 20 aa, Artificial Sequence
  Non-cyclic GFR-binding peptide
MIQMTINSMKEPVSSPEPIG

SEQ ID NO: 1059 - protein, 20 aa, Artificial Sequence
  Non-cyclic GFR-binding peptide
MIQMTINSLKTPASTPKTVH

SEQ ID NO: 1060 - protein, 20 aa, Artificial Sequence
  Non-cyclic GFR-binding peptide
MIQMTINSLKTPASSPKPVY

SEQ ID NO: 1061 - protein, 20 aa, Artificial Sequence
  Non-cyclic GFR-binding peptide
MIQMTINSLQTPASSPKPVT

SEQ ID NO: 1062 - protein, 20 aa, Artificial Sequence
  Non-cyclic GFR-binding peptide
MIQMTINSLKTPASSAKPVA

SEQ ID NO: 1063 - protein, 20 aa, Artificial Sequence
  Non-cyclic GFR-binding peptide
MIQMTINSLKTPASSPKPVH

SEQ ID NO: 1064 - protein, 20 aa, Artificial Sequence
  Non-cyclic GFR-binding peptide
MIQMTINSTKVPASSTSPVR

SEQ ID NO: 1065 - protein, 20 aa, Artificial Sequence
  Non-cyclic GFR-binding peptide
MIQMTINSLAQPVSSPAASA

SEQ ID NO: 1066 - protein, 20 aa, Artificial Sequence
  Non-cyclic GFR-binding peptide
MIQMTINSLDQSVSSPSASA

SEQ ID NO: 1067 - protein, 20 aa, Artificial Sequence
  Non-cyclic GFR-binding peptide
MIQMTINSLDQPVSSPSASA

SEQ ID NO: 1068 - protein, 20 aa, Artificial Sequence
  Non-cyclic GFR-binding peptide
MIQMTINSHHVRSPQSKVSS

SEQ ID NO: 1069 - protein, 20 aa, Artificial Sequence
  Non-cyclic GFR-binding peptide
MIQMTINSLQVQTPRSQVNR

SEQ ID NO: 1070 - protein, 20 aa, Artificial Sequence
  Non-cyclic GFR-binding peptide
VKAVKVSRLQVRSPRSQVNR

SEQ ID NO: 1071 - protein, 20 aa, Artificial Sequence
  Non-cyclic GFR-binding peptide
VKAVKVSRLETPVSSAKPIK

SEQ ID NO: 1072 - protein, 20 aa, Artificial Sequence
  Non-cyclic GFR-binding peptide
VKAVKVSRMKEPVSSPEPIG

SEQ ID NO: 1073 - protein, 20 aa, Artificial Sequence
  Non-cyclic GFR-binding peptide
VKAVKVSRLKTPASSPKPVY

SEQ ID NO: 1074 - protein, 20 aa, Artificial Sequence
  Non-cyclic GFR-binding peptide
VKAVKVSRLKTPASSAKPVA

SEQ ID NO: 1075 - protein, 20 aa, Artificial Sequence
  Non-cyclic GFR-binding peptide
VKAVKVSRLKTPVSSAKGVK

SEQ ID NO: 1076 - protein, 20 aa, Artificial Sequence
  Non-cyclic GFR-binding peptide
VKAVKVSRLKTPVSSAKSAK

SEQ ID NO: 1077 - protein, 20 aa, Artificial Sequence
  Non-cyclic GFR-binding peptide
VKAVKVSRMKTPTSSPGASG

SEQ ID NO: 1078 - protein, 20 aa, Artificial Sequence
  Non-cyclic GFR-binding peptide
VKAVKVSRLRAPVSSSAPAA

SEQ ID NO: 1079 - protein, 20 aa, Artificial Sequence
  Non-cyclic GFR-binding peptide
VKAVKVSRLRTPVSSTPPTS

SEQ ID NO: 1080 - protein, 20 aa, Artificial Sequence
  Non-cyclic GFR-binding peptide
VKAVKVSRLKTPASSPKPVH

SEQ ID NO: 1081 - protein, 20 aa, Artificial Sequence
  Non-cyclic GFR-binding peptide
VKAVKVSRTKVPASSTSPVR

SEQ ID NO: 1082 - protein, 20 aa, Artificial Sequence
  Non-cyclic GFR-binding peptide
VKAVKVSRLDQSVSSPSASA

SEQ ID NO: 1083 - protein, 20 aa, Artificial Sequence
  Non-cyclic GFR-binding peptide
VKAVKVSRQGTPVSELGEDN

SEQ ID NO: 1084 - protein, 20 aa, Artificial Sequence
  Non-cyclic GFR-binding peptide
VKAVKVSRLQVQTPRSQVNR

SEQ ID NO: 1085 - protein, 20 aa, Artificial Sequence
  Non-cyclic GFR-binding peptide
IKRVQVPRHHVQTPQSKVSS

SEQ ID NO: 1086 - protein, 20 aa, Artificial Sequence
  Non-cyclic GFR-binding peptide
IKRVQVPRLETPVSSAKPIK

SEQ ID NO: 1087 - protein, 20 aa, Artificial Sequence
  Non-cyclic GFR-binding peptide
IKRVQVPRMKEPVSSPEPIG

SEQ ID NO: 1088 - protein, 20 aa, Artificial Sequence
  Non-cyclic GFR-binding peptide
IKRVQVPRLETPVSSAKPIS

SEQ ID NO: 1089 - protein, 20 aa, Artificial Sequence
  Non-cyclic GFR-binding peptide
IKRVQVPRLKTPASTPKTVH

SEQ ID NO: 1090 - protein, 20 aa, Artificial Sequence
  Non-cyclic GFR-binding peptide
IKRVQVPRLKTPASSPKPVY

SEQ ID NO: 1091 - protein, 20 aa, Artificial Sequence
  Non-cyclic GFR-binding peptide
IKRVQVPRLQTPASSPKPVT

SEQ ID NO: 1092 - protein, 20 aa, Artificial Sequence
  Non-cyclic GFR-binding peptide
IKRVQVPRLKTPASSAKPVA

SEQ ID NO: 1093 - protein, 20 aa, Artificial Sequence
  Non-cyclic GFR-binding peptide
IKRVQVPRLKTPVSSAKGVK

SEQ ID NO: 1094 - protein, 20 aa, Artificial Sequence
  Non-cyclic GFR-binding peptide
IKRVQVPRLKTPVSSAKSAK

SEQ ID NO: 1095 - protein, 20 aa, Artificial Sequence
  Non-cyclic GFR-binding peptide
IKRVQVPRMKTPTSSPGASG

SEQ ID NO: 1096 - protein, 20 aa, Artificial Sequence
  Non-cyclic GFR-binding peptide
IKRVQVPRLRAPVSSSAPAA

SEQ ID NO: 1097 - protein, 20 aa, Artificial Sequence
  Non-cyclic GFR-binding peptide
IKRVQVPRLRTPVSSTPPTS

SEQ ID NO: 1098 - protein, 20 aa, Artificial Sequence
  Non-cyclic GFR-binding peptide
IKRVQVPRLKTPASSPKPVH

SEQ ID NO: 1099 - protein, 20 aa, Artificial Sequence
  Non-cyclic GFR-binding peptide
IKRVQVPRTKVPASSTSPVR

SEQ ID NO: 1100 - protein, 20 aa, Artificial Sequence
  Non-cyclic GFR-binding peptide
IKRVQVPRLDQSVSSPSASA

SEQ ID NO: 1101 - protein, 20 aa, Artificial Sequence
  Non-cyclic GFR-binding peptide
IKRVQVPRQGTPVSELGEDN

SEQ ID NO: 1102 - protein, 20 aa, Artificial Sequence
  Non-cyclic GFR-binding peptide
IKRVQVPRHHVRSPQSKVSS

SEQ ID NO: 1103 - protein, 8 aa, Artificial Sequence
  Non-cyclic GFR-binding peptide
LYLISIAS

SEQ ID NO: 1104 - protein, 8 aa, Artificial Sequence
  Non-cyclic GFR-binding peptide
LYLVSIAS

SEQ ID NO: 1105 - protein, 8 aa, Artificial Sequence
  Non-cyclic GFR-binding peptide
FFLMSLSS

SEQ ID NO: 1106 - protein, 8 aa, Artificial Sequence
  Non-cyclic GFR-binding peptide
FFLVSLSS

SEQ ID NO: 1107 - protein, 8 aa, Artificial Sequence
  Non-cyclic GFR-binding peptide
FYLMSIAN

SEQ ID NO: 1108 - protein, 8 aa, Artificial Sequence
  Non-cyclic GFR-binding peptide
FYLISIAN

SEQ ID NO: 1109 - protein, 8 aa, Artificial Sequence
  Non-cyclic GFR-binding peptide
YYLMSTAS

SEQ ID NO: 1110 - protein, 8 aa, Artificial Sequence
  Non-cyclic GFR-binding peptide
YYLISTAS

SEQ ID NO: 1111 - protein, 8 aa, Artificial Sequence
  Non-cyclic GFR-binding peptide
KYLMSIPS

SEQ ID NO: 1112 - protein, 8 aa, Artificial Sequence
  Non-cyclic GFR-binding peptide
KYLISIPS

SEQ ID NO: 1113 - protein, 8 aa, Artificial Sequence
  Non-cyclic GFR-binding peptide
LYLMSIPE

SEQ ID NO: 1114 - protein, 8 aa, Artificial Sequence
  Non-cyclic GFR-binding peptide
LYLVSIPE

SEQ ID NO: 1115 - protein, 8 aa, Artificial Sequence
  Non-cyclic GFR-binding peptide
FYLINIPS

SEQ ID NO: 1116 - protein, 8 aa, Artificial Sequence
  Non-cyclic GFR-binding peptide
FYLVNIPS

SEQ ID NO: 1117 - protein, 8 aa, Artificial Sequence
  Non-cyclic GFR-binding peptide
IYLMSIPS

SEQ ID NO: 1118 - protein, 8 aa, Artificial Sequence
  Non-cyclic GFR-binding peptide
IYLVSIPS

SEQ ID NO: 1119 - protein, 8 aa, Artificial Sequence
  Non-cyclic GFR-binding peptide
IFLMSIPS

SEQ ID NO: 1120 - protein, 8 aa, Artificial Sequence
  Non-cyclic GFR-binding peptide
IFLVSIPS

SEQ ID NO: 1121 - protein, 8 aa, Artificial Sequence
  Non-cyclic GFR-binding peptide
VYLISLPK

SEQ ID NO: 1122 - protein, 8 aa, Artificial Sequence
  Non-cyclic GFR-binding peptide
VYLVSLPK

SEQ ID NO: 1123 - protein, 8 aa, Artificial Sequence
  Non-cyclic GFR-binding peptide
YYVMPLPE

SEQ ID NO: 1124 - protein, 8 aa, Artificial Sequence
  Non-cyclic GFR-binding peptide
YYVVPLPE

SEQ ID NO: 1125 - protein, 8 aa, Artificial Sequence
  Non-cyclic GFR-binding peptide
YYLMTLPE

SEQ ID NO: 1126 - protein, 8 aa, Artificial Sequence
  Non-cyclic GFR-binding peptide
YYLVTLPE

SEQ ID NO: 1127 - protein, 8 aa, Artificial Sequence
  Non-cyclic GFR-binding peptide
MIQITINS

SEQ ID NO: 1128 - protein, 8 aa, Artificial Sequence
  Non-cyclic GFR-binding peptide
MIQVTINS

SEQ ID NO: 1129 - protein, 8 aa, Artificial Sequence
  Non-cyclic GFR-binding peptide
VKAMKVSR

SEQ ID NO: 1130 - protein, 8 aa, Artificial Sequence
  Non-cyclic GFR-binding peptide
VKAIKVSR

SEQ ID NO: 1131 - protein, 8 aa, Artificial Sequence
  Non-cyclic GFR-binding peptide
IKRMQVPR

SEQ ID NO: 1132 - protein, 8 aa, Artificial Sequence
  Non-cyclic GFR-binding peptide
IKRIQVPR

SEQ ID NO: 1133 - protein, 20 aa, Artificial Sequence
  Non-cyclic GFR-binding peptide
KIPKASSVPTELSAISMLYL

SEQ ID NO: 1134 - protein, 20 aa, Artificial Sequence
  Non-cyclic GFR-binding peptide
GIPEPSSVPEKMSSLSILFF

SEQ ID NO: 1135 - protein, 20 aa, Artificial Sequence
  Non-cyclic GFR-binding peptide
SIPKASSVPTELSAISMLYL

SEQ ID NO: 1136 - protein, 20 aa, Artificial Sequence
  Non-cyclic GFR-binding peptide
HVTKPTSAPTKLNAISVLYF

SEQ ID NO: 1137 - protein, 20 aa, Artificial Sequence
  Non-cyclic GFR-binding peptide
TVPKPSSAPTQLNAISVLYF

SEQ ID NO: 1138 - protein, 20 aa, Artificial Sequence
  Non-cyclic GFR-binding peptide
AVPKASSAPTKLSATSVLYY

SEQ ID NO: 1139 - protein, 20 aa, Artificial Sequence
  Non-cyclic GFR-binding peptide
KVGKASSVPTKLSPISVLYK

SEQ ID NO: 1140 - protein, 20 aa, Artificial Sequence
  Non-cyclic GFR-binding peptide
KASKASSVPTKLEPISILYL

SEQ ID NO: 1141 - protein, 20 aa, Artificial Sequence
  Non-cyclic GFR-binding peptide
GSAGPSSTPTKMSPINMLYF

SEQ ID NO: 1142 - protein, 20 aa, Artificial Sequence
  Non-cyclic GFR-binding peptide
STPPTSSVPTRLSPISILFI

SEQ ID NO: 1143 - protein, 20 aa, Artificial Sequence
  Non-cyclic GFR-binding peptide
HVPKPSSAPTKLNAISVLYF

SEQ ID NO: 1144 - protein, 20 aa, Artificial Sequence
  Non-cyclic GFR-binding peptide
RVPSTSSAPVKTKPLSMLYV

SEQ ID NO: 1145 - protein, 20 aa, Artificial Sequence
  Non-cyclic GFR-binding peptide
SSVKSQPSRVHHRSVKVAKV

SEQ ID NO: 1146 - protein, 20 aa, Artificial Sequence
  Non-cyclic GFR-binding peptide
RNVQSRPTQVQLRPVQVRKI

SEQ ID NO: 1147 - protein, 20 aa, Artificial Sequence
  Non-cyclic GFR-binding peptide
LYLMSIASLETPVSSAKPIK

SEQ ID NO: 1148 - protein, 20 aa, Artificial Sequence
  Non-cyclic GFR-binding peptide
FFLISLSSMKEPVSSPEPIG

SEQ ID NO: 1149 - protein, 20 aa, Artificial Sequence
  Non-cyclic GFR-binding peptide
LYLMSIASLETPVSSAKPIS

SEQ ID NO: 1150 - protein, 20 aa, Artificial Sequence
  Non-cyclic GFR-binding peptide
FYLVSIANLKTPASTPKTVH

SEQ ID NO: 1151 - protein, 20 aa, Artificial Sequence
  Non-cyclic GFR-binding peptide
FYLVSIANLQTPASSPKPVT

SEQ ID NO: 1152 - protein, 20 aa, Artificial Sequence
  Non-cyclic GFR-binding peptide
YYLVSTASLKTPASSAKPVA

SEQ ID NO: 1153 - protein, 20 aa, Artificial Sequence
  Non-cyclic GFR-binding peptide
KYLVSIPSLKTPVSSAKGVK

SEQ ID NO: 1154 - protein, 20 aa, Artificial Sequence
  Non-cyclic GFR-binding peptide
LYLISIPELKTPVSSAKSAK

SEQ ID NO: 1155 - protein, 20 aa, Artificial Sequence
  Non-cyclic GFR-binding peptide
FYLMNIPSMKTPTSSPGASG

SEQ ID NO: 1156 - protein, 20 aa, Artificial Sequence
  Non-cyclic GFR-binding peptide
IFLISIPSLRTPVSSTPPTS

SEQ ID NO: 1157 - protein, 20 aa, Artificial Sequence
  Non-cyclic GFR-binding peptide
FYLVSIANLKTPASSPKPVH

SEQ ID NO: 1158 - protein, 20 aa, Artificial Sequence
  Non-cyclic GFR-binding peptide
VYLMSLPKTKVPASSTSPVR

SEQ ID NO: 1159 - protein, 20 aa, Artificial Sequence
  Non-cyclic GFR-binding peptide
VKAVKVSRHHVRSPQSKVSS

SEQ ID NO: 1160 - protein, 20 aa, Artificial Sequence
  Non-cyclic GFR-binding peptide
IKRVQVPRLQVQTPRSQVNR

SEQ ID NO: 1161 - protein, 18 aa, Artificial Sequence
  Non-cyclic GFR-binding peptide
  MOD_RES (14), (15): Xaa is C or S
KYLMSIPSLETPVXXAKP

SEQ ID NO: 1162 - protein, 13 aa, Artificial Sequence
  Non-cyclic GFR-binding peptide
LYLVSIASLQTPA

SEQ ID NO: 1163 - protein, 10 aa, Artificial Sequence
  Non-cyclic GFR-binding peptide
YYLISTASLA

SEQ ID NO: 1164 - protein, 10 aa, Artificial Sequence
  Non-cyclic GFR-binding peptide
KYLMSIPSLE

SEQ ID NO: 1165 - protein, 18 aa, Artificial Sequence
  Non-cyclic GFR-binding peptide
  MOD_RES (14), (15): Xaa is C or S
KYLISIPSLDQSVXXPSA

SEQ ID NO: 1166 - protein, 19 aa, Artificial Sequence
  Non-cyclic GFR-binding peptide
  MOD_RES (14), (15): Xaa is C or S
YYLISTASLDQSVXXPSAS

SEQ ID NO: 1167 - protein, 19 aa, Artificial Sequence
  Non-cyclic GFR-binding peptide
  MOD_RES (14), (15): Xaa is C or S
LYLISIASLDQSVXXPSAS

SEQ ID NO: 1168 - protein, 11 aa, Artificial Sequence
  Non-cyclic GFR-binding peptide
FYLISIANLDQ

SEQ ID NO: 1169 - protein, 13 aa, Artificial Sequence
  Non-cyclic GFR-binding peptide
LYLISIASLAQPV

SEQ ID NO: 1170 - protein, 10 aa, Artificial Sequence
  Non-cyclic GFR-binding peptide
LYLISIASLA

SEQ ID NO: 1171 - protein, 16 aa, Artificial Sequence
  Non-cyclic GFR-binding peptide
  MOD_RES (14), (15): Xaa is C or S
YYLVSTASLQTPAXXP

SEQ ID NO: 1172 - protein, 16 aa, Artificial Sequence
  Non-cyclic GFR-binding peptide
  MOD_RES (14), (15): Xaa is C or S
YYLISTASLAQPVXXP

SEQ ID NO: 1173 - protein, 12 aa, Artificial Sequence
  Non-cyclic GFR-binding peptide
KYLISIPSLAQP

SEQ ID NO: 1174 - protein, 13 aa, Artificial Sequence
  Non-cyclic GFR-binding peptide
YYLISTASLDQSV

SEQ ID NO: 1175 - protein, 10 aa, Artificial Sequence
  Non-cyclic GFR-binding peptide
FYLMSIANLE

SEQ ID NO: 1176 - protein, 18 aa, Artificial Sequence
  Non-cyclic GFR-binding peptide
  MOD_RES (14), (15): Xaa is C or S
YYLISTASLDQPVXXPSA

SEQ ID NO: 1177 - protein, 18 aa, Artificial Sequence
  Non-cyclic GFR-binding peptide
  MOD_RES (14), (15): Xaa is C or S
YYLISTASLAQPVXXPAA

SEQ ID NO: 1178 - protein, 20 aa, Artificial Sequence
  Non-cyclic GFR-binding peptide
  MOD_RES (14), (15): Xaa is C or S
YYLVSTASLQTPAXXPKPVT

SEQ ID NO: 1179 - protein, 12 aa, Artificial Sequence
  Non-cyclic GFR-binding peptide
LYLISIASLDQS

SEQ ID NO: 1180 - protein, 18 aa, Artificial Sequence
  Non-cyclic GFR-binding peptide
  MOD_RES (14), (15): Xaa is C or S
FYLVSIANLKTPAXXAKP

SEQ ID NO: 1181 - protein, 17 aa, Artificial Sequence
  Non-cyclic GFR-binding peptide
  MOD_RES (16), (16): Xaa is C or S
KYLVSIPSLQVQTPRXQ

SEQ ID NO: 1182 - protein, 20 aa, Artificial Sequence
  Non-cyclic GFR-binding peptide
  MOD_RES (16), (16): Xaa is C or S
YYLVSTASLQVQTPRXQVNR

SEQ ID NO: 1183 - protein, 18 aa, Artificial Sequence
  Non-cyclic GFR-binding peptide
  MOD_RES (16), (16): Xaa is C or S
LYLVSIASLQVQTPRXQV

SEQ ID NO: 1184 - protein, 16 aa, Artificial Sequence
  Non-cyclic GFR-binding peptide
  MOD_RES (14), (15): Xaa is C or S
LYLISIASLAQPVXXP

SEQ ID NO: 1185 - protein, 12 aa, Artificial Sequence
  Non-cyclic GFR-binding peptide
KYLVSIPSLQTP

SEQ ID NO: 1186 - protein, 16 aa, Artificial Sequence
  Non-cyclic GFR-binding peptide
  MOD_RES (14), (15): Xaa is C or S
LYLVSIASLQTPAXXP

SEQ ID NO: 1187 - protein, 17 aa, Artificial Sequence
  Non-cyclic GFR-binding peptide
  MOD_RES (16), (16): Xaa is C or S
LYLVSIASLQVQTPRXQ

SEQ ID NO: 1188 - protein, 19 aa, Artificial Sequence
  Non-cyclic GFR-binding peptide
  MOD_RES (14), (15): Xaa is C or S
YYLVSTASLQTPAXXPKPV

SEQ ID NO: 1189 - protein, 13 aa, Artificial Sequence
  Non-cyclic GFR-binding peptide
LYLISIASLDQSV

SEQ ID NO: 1190 - protein, 14 aa, Artificial Sequence
  Non-cyclic GFR-binding peptide
FYLVSIANLQVQTP

SEQ ID NO: 1191 - protein, 17 aa, Artificial Sequence
  Non-cyclic GFR-binding peptide
  MOD_RES (14), (15): Xaa is C or S
FYLISIANLDQPVXXPS

SEQ ID NO: 1192 - protein, 16 aa, Artificial Sequence
  Non-cyclic GFR-binding peptide
  MOD_RES (14), (15): Xaa is C or S
LYLVSIASLKTPAXXA

SEQ ID NO: 1193 - protein, 20 aa, Artificial Sequence
  Non-cyclic GFR-binding peptide
  MOD_RES (14), (15): Xaa is C or S
FYLVSIANLKTPAXXAKPVA

SEQ ID NO: 1194 - protein, 18 aa, Artificial Sequence
  Non-cyclic GFR-binding peptide
  MOD_RES (14), (15): Xaa is C or S
LYLISIASLDQPVXXPSA

SEQ ID NO: 1195 - protein, 15 aa, Artificial Sequence
  Non-cyclic GFR-binding peptide
  MOD_RES (14), (15): Xaa is C or S
LYLISIASLAQPVXX

SEQ ID NO: 1196 - protein, 18 aa, Artificial Sequence
  Non-cyclic GFR-binding peptide
  MOD_RES (14), (15): Xaa is C or S
LYLVSIASLKTPVXXAKG

SEQ ID NO: 1197 - protein, 11 aa, Artificial Sequence
  Non-cyclic GFR-binding peptide
KYLISIPSLDQ

SEQ ID NO: 1198 - protein, 18 aa, Artificial Sequence
  Non-cyclic GFR-binding peptide
  MOD_RES (16), (16): Xaa is C or S
YYLVSTASLQVQTPRXQV

SEQ ID NO: 1199 - protein, 9 aa, Artificial Sequence
  Non-cyclic GFR-binding peptide
YYLMSTASL

SEQ ID NO: 1200 - protein, 18 aa, Artificial Sequence
  Non-cyclic GFR-binding peptide
  MOD_RES (14), (15): Xaa is C or S
FYLMSIANLETPVXXAKP

SEQ ID NO: 1201 - protein, 13 aa, Artificial Sequence
  Non-cyclic GFR-binding peptide
YYLISTASLAQPV

SEQ ID NO: 1202 - protein, 15 aa, Artificial Sequence
  Non-cyclic GFR-binding peptide
  MOD_RES (14), (14): Xaa is C or S
YYLVSTASLKTPAXT

SEQ ID NO: 1203 - protein, 11 aa, Artificial Sequence
  Non-cyclic GFR-binding peptide
KYLMSIPSLET

SEQ ID NO: 1204 - protein, 17 aa, Artificial Sequence
  Non-cyclic GFR-binding peptide
  MOD_RES (16), (16): Xaa is C or S
YYLVSTASLQVQTPRXQ

SEQ ID NO: 1205 - protein, 17 aa, Artificial Sequence
  Non-cyclic GFR-binding peptide
  MOD_RES (14), (15): Xaa is C or S
KYLISIPSLAQPVXXPA

SEQ ID NO: 1206 - protein, 18 aa, Artificial Sequence
  Non-cyclic GFR-binding peptide
  MOD_RES (14), (15): Xaa is C or S
FYLVSIANLKTPVXXAKG

SEQ ID NO: 1207 - protein, 20 aa, Artificial Sequence
  Non-cyclic GFR-binding peptide
  MOD_RES (14), (15): Xaa is C or S
YYLMSTASLETPVXXAKPIS

SEQ ID NO: 1208 - protein, 15 aa, Artificial Sequence
  Non-cyclic GFR-binding peptide
  MOD_RES (14), (15): Xaa is C or S
YYLISTASLAQPVXX

SEQ ID NO: 1209 - protein, 17 aa, Artificial Sequence
  Non-cyclic GFR-binding peptide
  MOD_RES (14), (15): Xaa is C or S
FYLMSIANLETPVXXAK

SEQ ID NO: 1210 - protein, 17 aa, Artificial Sequence
  Non-cyclic GFR-binding peptide
  MOD_RES (14), (15): Xaa is C or S
FYLISIANLAQPVXXPA

SEQ ID NO: 1211 - protein, 18 aa, Artificial Sequence
  Non-cyclic GFR-binding peptide
  MOD_RES (14), (15): Xaa is C or S
LYLISIASLAQPVXXPAA

SEQ ID NO: 1212 - protein, 20 aa, Artificial Sequence
  Non-cyclic GFR-binding peptide
  MOD_RES (14), (15): Xaa is C or S
LYLVSIASLQTPAXXPKPVT

SEQ ID NO: 1213 - protein, 19 aa, Artificial Sequence
  Non-cyclic GFR-binding peptide
  MOD_RES (14), (15): Xaa is C or S
LYLVSIASLQTPAXXPKPV

SEQ ID NO: 1214 - protein, 11 aa, Artificial Sequence
  Non-cyclic GFR-binding peptide
FYLMSIANLET

SEQ ID NO: 1215 - protein, 17 aa, Artificial Sequence
  Non-cyclic GFR-binding peptide
  MOD_RES (14), (15): Xaa is C or S
KYLMSIPSLETPVXXAK

SEQ ID NO: 1216 - protein, 12 aa, Artificial Sequence
  Non-cyclic GFR-binding peptide
YYLISTASLDQS

SEQ ID NO: 1217 - protein, 14 aa, Artificial Sequence
  Non-cyclic GFR-binding peptide
  MOD_RES (14), (14): Xaa is C or S
LYLISIASLAQPVX

SEQ ID NO: 1218 - protein, 20 aa, Artificial Sequence
  Non-cyclic GFR-binding peptide
  MOD_RES (14), (14): Xaa is C or S
LYLVSIASLKTPAXTPKTVH

SEQ ID NO: 1219 - protein, 20 aa, Artificial Sequence
  Non-cyclic GFR-binding peptide
  MOD_RES (14), (15): Xaa is C or S
KYLVSIPSLQTPAXXPKPVT

SEQ ID NO: 1220 - protein, 18 aa, Artificial Sequence
  Non-cyclic GFR-binding peptide
  MOD_RES (14), (15): Xaa is C or S
KYLISIPSLDQPVXXPSA

SEQ ID NO: 1221 - protein, 13 aa, Artificial Sequence
  Non-cyclic GFR-binding peptide
LYLVSIASLKTPA

SEQ ID NO: 1222 - protein, 19 aa, Artificial Sequence
  Non-cyclic GFR-binding peptide
  MOD_RES (14), (15): Xaa is C or S
YYLISTASLAQPVXXPAAS

SEQ ID NO: 1223 - protein, 17 aa, Artificial Sequence
  Non-cyclic GFR-binding peptide
  MOD_RES (14), (15): Xaa is C or S
FYLVSIANLKTPAXXAK

SEQ ID NO: 1224 - protein, 17 aa, Artificial Sequence
  Non-cyclic GFR-binding peptide
  MOD_RES (14), (15): Xaa is C or S
KYLISIPSLDQPVXXPS

SEQ ID NO: 1225 - protein, 19 aa, Artificial Sequence
  Non-cyclic GFR-binding peptide
  MOD_RES (14), (15): Xaa is C or S
YYLISTASLDQPVXXPSAS

SEQ ID NO: 1226 - protein, 16 aa, Artificial Sequence
  Non-cyclic GFR-binding peptide
  MOD_RES (16), (16): Xaa is C or S
LYLVSIASLQVQTPRX

SEQ ID NO: 1227 - protein, 19 aa, Artificial Sequence
  Non-cyclic GFR-binding peptide
  MOD_RES (14), (15): Xaa is C or S
LYLVSIASLKTPAXXAKPV

SEQ ID NO: 1228 - protein, 20 aa, Artificial Sequence
  Non-cyclic GFR-binding peptide
  MOD_RES (14), (15): Xaa is C or S
KYLVSIPSLKTPAXXAKPVA

SEQ ID NO: 1229 - protein, 16 aa, Artificial Sequence
  Non-cyclic GFR-binding peptide
  MOD_RES (14), (15): Xaa is C or S
KYLISIPSLAQPVXXP

SEQ ID NO: 1230 - protein, 20 aa, Artificial Sequence
  Non-cyclic GFR-binding peptide
  MOD_RES (16), (16): Xaa is C or S
FYLVSIANLQVQTPRXQVNR

SEQ ID NO: 1231 - protein, 16 aa, Artificial Sequence
  Non-cyclic GFR-binding peptide
  MOD_RES (14), (15): Xaa is C or S
YYLVSTASLKTPAXXP

SEQ ID NO: 1232 - protein, 19 aa, Artificial Sequence
  Non-cyclic GFR-binding peptide
  MOD_RES (14), (15): Xaa is C or S
LYLISIASLDQPVXXPSAS

SEQ ID NO: 1233 - protein, 17 aa, Artificial Sequence
  Non-cyclic GFR-binding peptide
  MOD_RES (14), (15): Xaa is C or S
FYLVSIANLKTPVXXAK

SEQ ID NO: 1234 - protein, 15 aa, Artificial Sequence
  Non-cyclic GFR-binding peptide
FYLVSIANLQVQTPR

SEQ ID NO: 1235 - protein, 19 aa, Artificial Sequence
  Non-cyclic GFR-binding peptide
  MOD_RES (14), (15): Xaa is C or S
KYLISIPSLDQSVXXPSAS

SEQ ID NO: 1236 - protein, 17 aa, Artificial Sequence
  Non-cyclic GFR-binding peptide
  MOD_RES (14), (14): Xaa is C or S
LYLVSIASLKTPAXTPK

SEQ ID NO: 1237 - protein, 15 aa, Artificial Sequence
  Non-cyclic GFR-binding peptide
  MOD_RES (14), (15): Xaa is C or S
FYLISIANLDQPVXX

SEQ ID NO: 1238 - protein, 14 aa, Artificial Sequence
  Non-cyclic GFR-binding peptide
  MOD_RES (14), (14): Xaa is C or S
KYLMSIPSLETPVX

SEQ ID NO: 1239 - protein, 17 aa, Artificial Sequence
  Non-cyclic GFR-binding peptide
  MOD_RES (14), (15): Xaa is C or S
YYLISTASLDQSVXXPS

SEQ ID NO: 1240 - protein, 11 aa, Artificial Sequence
  Non-cyclic GFR-binding peptide
LYLVSIASLKT

SEQ ID NO: 1241 - protein, 11 aa, Artificial Sequence
  Non-cyclic GFR-binding peptide
YYLISTASLAQ

SEQ ID NO: 1242 - protein, 11 aa, Artificial Sequence
  Non-cyclic GFR-binding peptide
YYLISTASLDQ

SEQ ID NO: 1243 - protein, 12 aa, Artificial Sequence
  Non-cyclic GFR-binding peptide
YYLMSTASLETP

SEQ ID NO: 1244 - protein, 20 aa, Artificial Sequence
  Non-cyclic GFR-binding peptide
  MOD_RES (14), (15): Xaa is C or S
FYLMSIANLETPVXXAKPIK

SEQ ID NO: 1245 - protein, 18 aa, Artificial Sequence
  Non-cyclic GFR-binding peptide
  MOD_RES (16), (16): Xaa is C or S
FYLVSIANLQVQTPRXQV

SEQ ID NO: 1246 - protein, 17 aa, Artificial Sequence
  Non-cyclic GFR-binding peptide
  MOD_RES (14), (15): Xaa is C or S
LYLVSIASLKTPAXXPK

SEQ ID NO: 1247 - protein, 12 aa, Artificial Sequence
  Non-cyclic GFR-binding peptide
FYLISIANLDQS

SEQ ID NO: 1248 - protein, 18 aa, Artificial Sequence
  Non-cyclic GFR-binding peptide
  MOD_RES (14), (15): Xaa is C or S
LYLVSIASLKTPAXXAKP

SEQ ID NO: 1249 - protein, 11 aa, Artificial Sequence
  Non-cyclic GFR-binding peptide
FYLVSIANLQV

SEQ ID NO: 1250 - protein, 10 aa, Artificial Sequence
  Non-cyclic GFR-binding peptide
FYLISIANLA

SEQ ID NO: 1251 - protein, 15 aa, Artificial Sequence
  Non-cyclic GFR-binding peptide
  MOD_RES (14), (15): Xaa is C or S
FYLISIANLAQPVXX

SEQ ID NO: 1252 - protein, 13 aa, Artificial Sequence
  Non-cyclic GFR-binding peptide
LYLISIASLDQPV

SEQ ID NO: 1253 - protein, 13 aa, Artificial Sequence
  Non-cyclic GFR-binding peptide
FYLISIANLAQPV

SEQ ID NO: 1254 - protein, 12 aa, Artificial Sequence
  Non-cyclic GFR-binding peptide
KYLMSIPSLETP

SEQ ID NO: 1255 - protein, 14 aa, Artificial Sequence
  Non-cyclic GFR-binding peptide
  MOD_RES (14), (14): Xaa is C or S
YYLMSTASLETPVX

SEQ ID NO: 1256 - protein, 14 aa, Artificial Sequence
  Non-cyclic GFR-binding peptide
  MOD_RES (14), (14): Xaa is C or S
LYLISIASLDQPVX

SEQ ID NO: 1257 - protein, 9 aa, Artificial Sequence
  Non-cyclic GFR-binding peptide
KYLMSIPSL

SEQ ID NO: 1258 - protein, 15 aa, Artificial Sequence
  Non-cyclic GFR-binding peptide
  MOD_RES (14), (14): Xaa is C or S
KYLVSIPSLKTPAXT

SEQ ID NO: 1259 - protein, 18 aa, Artificial Sequence
  Non-cyclic GFR-binding peptide
  MOD_RES (14), (15): Xaa is C or S
LYLVSIASLKTPAXXPKP

SEQ ID NO: 1260 - protein, 16 aa, Artificial Sequence
  Non-cyclic GFR-binding peptide
  MOD_RES (14), (15): Xaa is C or S
YYLISTASLDQPVXXP

SEQ ID NO: 1261 - protein, 14 aa, Artificial Sequence
  Non-cyclic GFR-binding peptide
  MOD_RES (14), (14): Xaa is C or S
FYLISIANLDQSVX

SEQ ID NO: 1262 - protein, 18 aa, Artificial Sequence
  Non-cyclic GFR-binding peptide
  MOD_RES (14), (15): Xaa is C or S
YYLVSTASLKTPVXXAKG

SEQ ID NO: 1263 - protein, 15 aa, Artificial Sequence
  Non-cyclic GFR-binding peptide
  MOD_RES (14), (15): Xaa is C or S
KYLMSIPSLETPVXX

SEQ ID NO: 1264 - protein, 16 aa, Artificial Sequence
  Non-cyclic GFR-binding peptide
  MOD_RES (14), (15): Xaa is C or S
YYLISTASLDQSVXXP

SEQ ID NO: 1265 - protein, 14 aa, Artificial Sequence
  Non-cyclic GFR-binding peptide
  MOD_RES (14), (14): Xaa is C or S
FYLISIANLDQPVX

SEQ ID NO: 1266 - protein, 13 aa, Artificial Sequence
  Non-cyclic GFR-binding peptide
FYLISIANLDQPV

SEQ ID NO: 1267 - protein, 20 aa, Artificial Sequence
  Non-cyclic GFR-binding peptide
  MOD_RES (14), (15): Xaa is C or S
KYLISIPSLDQPVXXPSASA

SEQ ID NO: 1268 - protein, 15 aa, Artificial Sequence
  Non-cyclic GFR-binding peptide
  MOD_RES (14), (15): Xaa is C or S
YYLISTASLDQSVXX

SEQ ID NO: 1269 - protein, 15 aa, Artificial Sequence
  Non-cyclic GFR-binding peptide
  MOD_RES (14), (15): Xaa is C or S
LYLVSIASLKTPAXX

SEQ ID NO: 1270 - protein, 19 aa, Artificial Sequence
  Non-cyclic GFR-binding peptide
  MOD_RES (14), (15): Xaa is C or S
FYLVSIANLKTPVXXAKGV

SEQ ID NO: 1271 - protein, 16 aa, Artificial Sequence
  Non-cyclic GFR-binding peptide
  MOD_RES (14), (15): Xaa is C or S
FYLVSIANLKTPVXXA

SEQ ID NO: 1272 - protein, 9 aa, Artificial Sequence
  Non-cyclic GFR-binding peptide
LYLISIASL

SEQ ID NO: 1273 - protein, 16 aa, Artificial Sequence
  Non-cyclic GFR-binding peptide
  MOD_RES (14), (15): Xaa is C or S
KYLISIPSLDQSVXXP

SEQ ID NO: 1274 - protein, 10 aa, Artificial Sequence
  Non-cyclic GFR-binding peptide
FYLISIANLD

SEQ ID NO: 1275 - protein, 15 aa, Artificial Sequence
  Non-cyclic GFR-binding peptide
  MOD_RES (14), (15): Xaa is C or S
LYLVSIASLQTPAXX

SEQ ID NO: 1276 - protein, 18 aa, Artificial Sequence
  Non-cyclic GFR-binding peptide
  MOD_RES (14), (15): Xaa is C or S
LYLVSIASLQTPAXXPKP

SEQ ID NO: 1277 - protein, 20 aa, Artificial Sequence
  Non-cyclic GFR-binding peptide
  MOD_RES (14), (15): Xaa is C or S
FYLISIANLAQPVXXPAASA

SEQ ID NO: 1278 - protein, 19 aa, Artificial Sequence
  Non-cyclic GFR-binding peptide
  MOD_RES (14), (14): Xaa is C or S
LYLVSIASLKTPAXTPKTV

SEQ ID NO: 1279 - protein, 13 aa, Artificial Sequence
  Non-cyclic GFR-binding peptide
LYLVSIASLQVQT

SEQ ID NO: 1280 - protein, 20 aa, Artificial Sequence
  Non-cyclic GFR-binding peptide
  MOD_RES (14), (15): Xaa is C or S
LYLISIASLAQPVXXPAASA

SEQ ID NO: 1281 - protein, 13 aa, Artificial Sequence
  Non-cyclic GFR-binding peptide
FYLVSIANLQVQT

SEQ ID NO: 1282 - protein, 18 aa, Artificial Sequence
  Non-cyclic GFR-binding peptide
  MOD_RES (14), (15): Xaa is C or S
FYLISIANLDQSVXXPSA

SEQ ID NO: 1283 - protein, 12 aa, Artificial Sequence
  Non-cyclic GFR-binding peptide
LYLISIASLAQP

SEQ ID NO: 1284 - protein, 20 aa, Artificial Sequence
  Non-cyclic GFR-binding peptide
  MOD_RES (14), (15): Xaa is C or S
YYLVSTASLKTPAXXPKPVY

SEQ ID NO: 1285 - protein, 16 aa, Artificial Sequence
  Non-cyclic GFR-binding peptide
  MOD_RES (14), (15): Xaa is C or S
LYLVSIASLKTPVXXA

SEQ ID NO: 1286 - protein, 12 aa, Artificial Sequence
  Non-cyclic GFR-binding peptide
FYLISIANLAQP

SEQ ID NO: 1287 - protein, 12 aa, Artificial Sequence
  Non-cyclic GFR-binding peptide
LYLISIASLDQP

SEQ ID NO: 1288 - protein, 19 aa, Artificial Sequence
  Non-cyclic GFR-binding peptide
  MOD_RES (16), (16): Xaa is C or S
FYLVSIANLQVQTPRXQVN

SEQ ID NO: 1289 - protein, 12 aa, Artificial Sequence
  Non-cyclic GFR-binding peptide
YYLVSTASLQTP

SEQ ID NO: 1290 - protein, 10 aa, Artificial Sequence
  Non-cyclic GFR-binding peptide
YYLMSTASLE

SEQ ID NO: 1291 - protein, 18 aa, Artificial Sequence
  Non-cyclic GFR-binding peptide
  MOD_RES (14), (14): Xaa is C or S
LYLVSIASLKTPAXTPKT

SEQ ID NO: 1292 - protein, 19 aa, Artificial Sequence
  Non-cyclic GFR-binding peptide
  MOD_RES (14), (15): Xaa is C or S
YYLMSTASLETPVXXAKPI

SEQ ID NO: 1293 - protein, 20 aa, Artificial Sequence
  Non-cyclic GFR-binding peptide
  MOD_RES (16), (16): Xaa is C or S
LYLVSIASLQVQTPRXQVNR

SEQ ID NO: 1294 - protein, 15 aa, Artificial Sequence
  Non-cyclic GFR-binding peptide
LYLVSIASLQVQTPR

SEQ ID NO: 1295 - protein, 17 aa, Artificial Sequence
  Non-cyclic GFR-binding peptide
  MOD_RES (14), (15): Xaa is C or S
LYLVSIASLQTPAXXPK

SEQ ID NO: 1296 - protein, 18 aa, Artificial Sequence
  Non-cyclic GFR-binding peptide
  MOD_RES (14), (15): Xaa is C or S
LYLISIASLDQSVXXPSA

SEQ ID NO: 1297 - protein, 9 aa, Artificial Sequence
  Non-cyclic GFR-binding peptide
FYLISIANL

SEQ ID NO: 1298 - protein, 17 aa, Artificial Sequence
  Non-cyclic GFR-binding peptide
  MOD_RES (14), (15): Xaa is C or S
YYLVSTASLKTPVXXAK

SEQ ID NO: 1299 - protein, 17 aa, Artificial Sequence
  Non-cyclic GFR-binding peptide
  MOD_RES (14), (15): Xaa is C or S
KYLISIPSLDQSVXXPS

SEQ ID NO: 1300 - protein, 14 aa, Artificial Sequence
  Non-cyclic GFR-binding peptide
  MOD_RES (14), (14): Xaa is C or S
FYLISIANLAQPVX

SEQ ID NO: 1301 - protein, 17 aa, Artificial Sequence
  Non-cyclic GFR-binding peptide
  MOD_RES (14), (15): Xaa is C or S
LYLVSIASLKTPAXXAK

SEQ ID NO: 1302 - protein, 10 aa, Artificial Sequence
  Non-cyclic GFR-binding peptide
LYLVSIASLQ

SEQ ID NO: 1303 - protein, 15 aa, Artificial Sequence
  Non-cyclic GFR-binding peptide
  MOD_RES (14), (15): Xaa is C or S
KYLVSIPSLKTPAXX

SEQ ID NO: 1304 - protein, 11 aa, Artificial Sequence
  Non-cyclic GFR-binding peptide
LYLVSIASLQV

SEQ ID NO: 1305 - protein, 12 aa, Artificial Sequence
  Non-cyclic GFR-binding peptide
LYLVSIASLQVQ

SEQ ID NO: 1306 - protein, 16 aa, Artificial Sequence
  Non-cyclic GFR-binding peptide
  MOD_RES (14), (15): Xaa is C or S
KYLVSIPSLKTPAXXP

SEQ ID NO: 1307 - protein, 19 aa, Artificial Sequence
  Non-cyclic GFR-binding peptide
  MOD_RES (14), (15): Xaa is C or S
KYLISIPSLAQPVXXPAAS

SEQ ID NO: 1308 - protein, 19 aa, Artificial Sequence
  Non-cyclic GFR-binding peptide
  MOD_RES (14), (15): Xaa is C or S
FYLISIANLAQPVXXPAAS

SEQ ID NO: 1309 - protein, 19 aa, Artificial Sequence
  Non-cyclic GFR-binding peptide
  MOD_RES (14), (15): Xaa is C or S
KYLMSIPSLETPVXXAKPI

SEQ ID NO: 1310 - protein, 13 aa, Artificial Sequence
  Non-cyclic GFR-binding peptide
KYLISIPSLDQPV

SEQ ID NO: 1311 - protein, 10 aa, Artificial Sequence
  Non-cyclic GFR-binding peptide
YYLVSTASLQ

SEQ ID NO: 1312 - protein, 19 aa, Artificial Sequence
  Non-cyclic GFR-binding peptide
  MOD_RES (16), (16): Xaa is C or S
YYLVSTASLQVQTPRXQVN

SEQ ID NO: 1313 - protein, 14 aa, Artificial Sequence
  Non-cyclic GFR-binding peptide
  MOD_RES (14), (14): Xaa is C or S
KYLVSIPSLQTPAX

SEQ ID NO: 1314 - protein, 12 aa, Artificial Sequence
  Non-cyclic GFR-binding peptide
FYLMSIANLETP

SEQ ID NO: 1315 - protein, 12 aa, Artificial Sequence
  Non-cyclic GFR-binding peptide
YYLVSTASLQVQ

SEQ ID NO: 1316 - protein, 17 aa, Artificial Sequence
  Non-cyclic GFR-binding peptide
  MOD_RES (14), (15): Xaa is C or S
YYLISTASLDQPVXXPS

SEQ ID NO: 1317 - protein, 16 aa, Artificial Sequence
  Non-cyclic GFR-binding peptide
  MOD_RES (14), (15): Xaa is C or S
KYLMSIPSLETPVXXA

SEQ ID NO: 1318 - protein, 19 aa, Artificial Sequence
  Non-cyclic GFR-binding peptide
  MOD_RES (16), (16): Xaa is C or S
LYLVSIASLQVQTPRXQVN

SEQ ID NO: 1319 - protein, 15 aa, Artificial Sequence
  Non-cyclic GFR-binding peptide
YYLVSTASLQVQTPR

SEQ ID NO: 1320 - protein, 14 aa, Artificial Sequence
  Non-cyclic GFR-binding peptide
YYLVSTASLQVQTP

SEQ ID NO: 1321 - protein, 9 aa, Artificial Sequence
  Non-cyclic GFR-binding peptide
YYLISTASL

SEQ ID NO: 1322 - protein, 17 aa, Artificial Sequence
  Non-cyclic GFR-binding peptide
  MOD_RES (14), (15): Xaa is C or S
YYLMSTASLETPVXXAK

SEQ ID NO: 1323 - protein, 18 aa, Artificial Sequence
  Non-cyclic GFR-binding peptide
  MOD_RES (14), (14): Xaa is C or S
YYLVSTASLKTPAXTPKT

SEQ ID NO: 1324 - protein, 13 aa, Artificial Sequence
  Non-cyclic GFR-binding peptide
KYLMSIPSLETPV

SEQ ID NO: 1325 - protein, 16 aa, Artificial Sequence
  Non-cyclic GFR-binding peptide
  MOD_RES (16), (16): Xaa is C or S
KYLVSIPSLQVQTPRX

SEQ ID NO: 1326 - protein, 13 aa, Artificial Sequence
  Non-cyclic GFR-binding peptide
FYLVSIANLKTPV

SEQ ID NO: 1327 - protein, 14 aa, Artificial Sequence
  Non-cyclic GFR-binding peptide
  MOD_RES (14), (14): Xaa is C or S
KYLISIPSLDQSVX

SEQ ID NO: 1328 - protein, 19 aa, Artificial Sequence
  Non-cyclic GFR-binding peptide
  MOD_RES (14), (15): Xaa is C or S
FYLVSIANLKTPAXXAKPV

SEQ ID NO: 1329 - protein, 12 aa, Artificial Sequence
  Non-cyclic GFR-binding peptide
FYLISIANLDQP

SEQ ID NO: 1330 - protein, 14 aa, Artificial Sequence
  Non-cyclic GFR-binding peptide
  MOD_RES (14), (14): Xaa is C or S
LYLVSIASLKTPAX

SEQ ID NO: 1331 - protein, 16 aa, Artificial Sequence
  Non-cyclic GFR-binding peptide
  MOD_RES (16), (16): Xaa is C or S
FYLVSIANLQVQTPRX

SEQ ID NO: 1332 - protein, 17 aa, Artificial Sequence
  Non-cyclic GFR-binding peptide
  MOD_RES (14), (15): Xaa is C or S
LYLISIASLDQPVXXPS

SEQ ID NO: 1333 - protein, 19 aa, Artificial Sequence
  Non-cyclic GFR-binding peptide
  MOD_RES (14), (15): Xaa is C or S
LYLVSIASLKTPAXXPKPV

SEQ ID NO: 1334 - protein, 19 aa, Artificial Sequence
  Non-cyclic GFR-binding peptide
  MOD_RES (14), (15): Xaa is C or S
FYLMSIANLETPVXXAKPI

SEQ ID NO: 1335 - protein, 14 aa, Artificial Sequence
  Non-cyclic GFR-binding peptide
  MOD_RES (14), (14): Xaa is C or S
YYLVSTASLKTPVX

SEQ ID NO: 1336 - protein, 20 aa, Artificial Sequence
  Non-cyclic GFR-binding peptide
  MOD_RES (14), (15): Xaa is C or S
KYLMSIPSLETPVXXAKPIS

SEQ ID NO: 1337 - protein, 19 aa, Artificial Sequence
  Non-cyclic GFR-binding peptide
  MOD_RES (14), (15): Xaa is C or S
FYLISIANLDQPVXXPSAS

SEQ ID NO: 1338 - protein, 19 aa, Artificial Sequence
  Non-cyclic GFR-binding peptide
  MOD_RES (14), (15): Xaa is C or S
LYLVSIASLKTPVXXAKGV

SEQ ID NO: 1339 - protein, 20 aa, Artificial Sequence
  Non-cyclic GFR-binding peptide
  MOD_RES (14), (15): Xaa is C or S
FYLMSIANLETPVXXAKPIS

SEQ ID NO: 1340 - protein, 19 aa, Artificial Sequence
  Non-cyclic GFR-binding peptide
  MOD_RES (14), (15): Xaa is C or S
KYLVSIPSLKTPAXXAKPV

SEQ ID NO: 1341 - protein, 16 aa, Artificial Sequence
  Non-cyclic GFR-binding peptide
  MOD_RES (14), (15): Xaa is C or S
FYLMSIANLETPVXXA

SEQ ID NO: 1342 - protein, 17 aa, Artificial Sequence
  Non-cyclic GFR-binding peptide
  MOD_RES (14), (15): Xaa is C or S
YYLISTASLAQPVXXPA

SEQ ID NO: 1343 - protein, 15 aa, Artificial Sequence
  Non-cyclic GFR-binding peptide
  MOD_RES (14), (15): Xaa is C or S
LYLISIASLDQPVXX

SEQ ID NO: 1344 - protein, 10 aa, Artificial Sequence
  Non-cyclic GFR-binding peptide
LYLISIASLD

SEQ ID NO: 1345 - protein, 17 aa, Artificial Sequence
  Non-cyclic GFR-binding peptide
  MOD_RES (14), (15): Xaa is C or S
LYLVSIASLKTPVXXAK

SEQ ID NO: 1346 - protein, 19 aa, Artificial Sequence
  Non-cyclic GFR-binding peptide
  MOD_RES (14), (15): Xaa is C or S
KYLISIPSLDQPVXXPSAS

SEQ ID NO: 1347 - protein, 9 aa, Artificial Sequence
  Non-cyclic GFR-binding peptide
FYLMSIANL

SEQ ID NO: 1348 - protein, 20 aa, Artificial Sequence
  Non-cyclic GFR-binding peptide
  MOD_RES (14), (15): Xaa is C or S
LYLVSIASLKTPAXXAKPVA

SEQ ID NO: 1349 - protein, 20 aa, Artificial Sequence
  Non-cyclic GFR-binding peptide
  MOD_RES (14), (15): Xaa is C or S
KYLVSIPSLKTPAXXPKPVY

SEQ ID NO: 1350 - protein, 10 aa, Artificial Sequence
  Non-cyclic GFR-binding peptide
YYLISTASLD

SEQ ID NO: 1351 - protein, 16 aa, Artificial Sequence
  Non-cyclic GFR-binding peptide
  MOD_RES (14), (15): Xaa is C or S
FYLVSIANLKTPAXXA

SEQ ID NO: 1352 - protein, 16 aa, Artificial Sequence
  Non-cyclic GFR-binding peptide
  MOD_RES (14), (14): Xaa is C or S
YYLVSTASLKTPAXTP

SEQ ID NO: 1353 - protein, 11 aa, Artificial Sequence
  Non-cyclic GFR-binding peptide
YYLVSTASLQT

SEQ ID NO: 1354 - protein, 17 aa, Artificial Sequence
  Non-cyclic GFR-binding peptide
  MOD_RES (14), (15): Xaa is C or S
LYLISIASLAQPVXXPA

SEQ ID NO: 1355 - protein, 15 aa, Artificial Sequence
  Non-cyclic GFR-binding peptide
  MOD_RES (14), (15): Xaa is C or S
LYLVSIASLKTPVXX

SEQ ID NO: 1356 - protein, 16 aa, Artificial Sequence
  Non-cyclic GFR-binding peptide
  MOD_RES (14), (14): Xaa is C or S
LYLVSIASLKTPAXTP

SEQ ID NO: 1357 - protein, 14 aa, Artificial Sequence
  Non-cyclic GFR-binding peptide
  MOD_RES (14), (14): Xaa is C or S
LYLISIASLDQSVX

SEQ ID NO: 1358 - protein, 15 aa, Artificial Sequence
  Non-cyclic GFR-binding peptide
  MOD_RES (14), (15): Xaa is C or S
FYLVSIANLKTPVXX

SEQ ID NO: 1359 - protein, 19 aa, Artificial Sequence
  Non-cyclic GFR-binding peptide
  MOD_RES (14), (15): Xaa is C or S
YYLVSTASLKTPVXXAKGV

SEQ ID NO: 1360 - protein, 9 aa, Artificial Sequence
  Non-cyclic GFR-binding peptide
LYLVSIASL

SEQ ID NO: 1361 - protein, 11 aa, Artificial Sequence
  Non-cyclic GFR-binding peptide
KYLVSIPSLQV

SEQ ID NO: 1362 - protein, 11 aa, Artificial Sequence
  Non-cyclic GFR-binding peptide
LYLISIASLAQ

SEQ ID NO: 1363 - protein, 11 aa, Artificial Sequence
  Non-cyclic GFR-binding peptide
KYLVSIPSLQT

SEQ ID NO: 1364 - protein, 16 aa, Artificial Sequence
  Non-cyclic GFR-binding peptide
  MOD_RES (14), (15): Xaa is C or S
LYLISIASLDQPVXXP

SEQ ID NO: 1365 - protein, 20 aa, Artificial Sequence
  Non-cyclic GFR-binding peptide
  MOD_RES (14), (15): Xaa is C or S
YYLISTASLDQPVXXPSASA

SEQ ID NO: 1366 - protein, 17 aa, Artificial Sequence
  Non-cyclic GFR-binding peptide
  MOD_RES (14), (15): Xaa is C or S
YYLVSTASLKTPAXXPK

SEQ ID NO: 1367 - protein, 15 aa, Artificial Sequence
  Non-cyclic GFR-binding peptide
  MOD_RES (14), (15): Xaa is C or S
YYLVSTASLKTPVXX

SEQ ID NO: 1368 - protein, 19 aa, Artificial Sequence
  Non-cyclic GFR-binding peptide
  MOD_RES (14), (15): Xaa is C or S
KYLVSIPSLQTPAXXPKPV

SEQ ID NO: 1369 - protein, 20 aa, Artificial Sequence
  Non-cyclic GFR-binding peptide
  MOD_RES (14), (15): Xaa is C or S
LYLVSIASLKTPVXXAKGVK

SEQ ID NO: 1370 - protein, 20 aa, Artificial Sequence
  Non-cyclic GFR-binding peptide
  MOD_RES (14), (15): Xaa is C or S
LYLISIASLDQSVXXPSASA

SEQ ID NO: 1371 - protein, 18 aa, Artificial Sequence
  Non-cyclic GFR-binding peptide
  MOD_RES (14), (15): Xaa is C or S
FYLISIANLAQPVXXPAA

SEQ ID NO: 1372 - protein, 16 aa, Artificial Sequence
  Non-cyclic GFR-binding peptide
  MOD_RES (14), (15): Xaa is C or S
KYLVSIPSLKTPAXXA

SEQ ID NO: 1373 - protein, 16 aa, Artificial Sequence
  Non-cyclic GFR-binding peptide
  MOD_RES (14), (14): Xaa is C or S
KYLVSIPSLKTPAXTP

SEQ ID NO: 1374 - protein, 15 aa, Artificial Sequence
  Non-cyclic GFR-binding peptide
  MOD_RES (14), (15): Xaa is C or S
FYLISIANLDQSVXX

SEQ ID NO: 1375 - protein, 19 aa, Artificial Sequence
  Non-cyclic GFR-binding peptide
  MOD_RES (14), (15): Xaa is C or S
KYLVSIPSLKTPAXXPKPV

SEQ ID NO: 1376 - protein, 15 aa, Artificial Sequence
  Non-cyclic GFR-binding peptide
  MOD_RES (14), (15): Xaa is C or S
YYLISTASLDQPVXX

SEQ ID NO: 1377 - protein, 16 aa, Artificial Sequence
  Non-cyclic GFR-binding peptide
  MOD_RES (14), (15): Xaa is C or S
LYLVSIASLKTPAXXP

SEQ ID NO: 1378 - protein, 13 aa, Artificial Sequence
  Non-cyclic GFR-binding peptide
LYLVSIASLKTPV

SEQ ID NO: 1379 - protein, 13 aa, Artificial Sequence
  Non-cyclic GFR-binding peptide
YYLISTASLDQPV

SEQ ID NO: 1380 - protein, 12 aa, Artificial Sequence
  Non-cyclic GFR-binding peptide
KYLVSIPSLQVQ

SEQ ID NO: 1381 - protein, 20 aa, Artificial Sequence
  Non-cyclic GFR-binding peptide
  MOD_RES (14), (15): Xaa is C or S
YYLVSTASLKTPVXXAKGVK

SEQ ID NO: 1382 - protein, 11 aa, Artificial Sequence
  Non-cyclic GFR-binding peptide
FYLISIANLAQ

SEQ ID NO: 1383 - protein, 20 aa, Artificial Sequence
  Non-cyclic GFR-binding peptide
  MOD_RES (14), (15): Xaa is C or S
FYLISIANLDQSVXXPSASA

SEQ ID NO: 1384 - protein, 14 aa, Artificial Sequence
  Non-cyclic GFR-binding peptide
LYLVSIASLQVQTP

SEQ ID NO: 1385 - protein, 10 aa, Artificial Sequence
  Non-cyclic GFR-binding peptide
KYLVSIPSLQ

SEQ ID NO: 1386 - protein, 11 aa, Artificial Sequence
  Non-cyclic GFR-binding peptide
LYLVSIASLQT

SEQ ID NO: 1387 - protein, 14 aa, Artificial Sequence
  Non-cyclic GFR-binding peptide
  MOD_RES (14), (14): Xaa is C or S
LYLVSIASLQTPAX

SEQ ID NO: 1388 - protein, 13 aa, Artificial Sequence
  Non-cyclic GFR-binding peptide
FYLISIANLDQSV

SEQ ID NO: 1389 - protein, 11 aa, Artificial Sequence
  Non-cyclic GFR-binding peptide
LYLISIASLDQ

SEQ ID NO: 1390 - protein, 16 aa, Artificial Sequence
  Non-cyclic GFR-binding peptide
  MOD_RES (14), (15): Xaa is C or S
KYLISIPSLDQPVXXP

SEQ ID NO: 1391 - protein, 15 aa, Artificial Sequence
  Non-cyclic GFR-binding peptide
  MOD_RES (14), (15): Xaa is C or S
KYLISIPSLDQSVXX

SEQ ID NO: 1392 - protein, 18 aa, Artificial Sequence
  Non-cyclic GFR-binding peptide
  MOD_RES (14), (15): Xaa is C or S
FYLISIANLDQPVXXPSA

SEQ ID NO: 1393 - protein, 11 aa, Artificial Sequence
  Non-cyclic GFR-binding peptide
KYLISIPSLAQ

SEQ ID NO: 1394 - protein, 20 aa, Artificial Sequence
  Non-cyclic GFR-binding peptide
  MOD_RES (14), (15): Xaa is C or S
KYLISIPSLDQSVXXPSASA

SEQ ID NO: 1395 - protein, 15 aa, Artificial Sequence
  Non-cyclic GFR-binding peptide
  MOD_RES (14), (15): Xaa is C or S
YYLMSTASLETPVXX

SEQ ID NO: 1396 - protein, 17 aa, Artificial Sequence
  Non-cyclic GFR-binding peptide
  MOD_RES (14), (14): Xaa is C or S
KYLVSIPSLKTPAXTPK

SEQ ID NO: 1397 - protein, 14 aa, Artificial Sequence
  Non-cyclic GFR-binding peptide
  MOD_RES (14), (14): Xaa is C or S
YYLISTASLDQSVX

SEQ ID NO: 1398 - protein, 16 aa, Artificial Sequence
  Non-cyclic GFR-binding peptide
  MOD_RES (14), (15): Xaa is C or S
FYLISIANLDQPVXXP

SEQ ID NO: 1399 - protein, 13 aa, Artificial Sequence
  Non-cyclic GFR-binding peptide
KYLISIPSLDQSV

SEQ ID NO: 1400 - protein, 13 aa, Artificial Sequence
  Non-cyclic GFR-binding peptide
YYLMSTASLETPV

SEQ ID NO: 1401 - protein, 14 aa, Artificial Sequence
  Non-cyclic GFR-binding peptide
  MOD_RES (14), (14): Xaa is C or S
YYLVSTASLQTPAX

SEQ ID NO: 1402 - protein, 9 aa, Artificial Sequence
  Non-cyclic GFR-binding peptide
KYLISIPSL

SEQ ID NO: 1403 - protein, 16 aa, Artificial Sequence
  Non-cyclic GFR-binding peptide
  MOD_RES (16), (16): Xaa is C or S
YYLVSTASLQVQTPRX

SEQ ID NO: 1404 - protein, 15 aa, Artificial Sequence
  Non-cyclic GFR-binding peptide
  MOD_RES (14), (15): Xaa is C or S
KYLISIPSLAQPVXX

SEQ ID NO: 1405 - protein, 16 aa, Artificial Sequence
  Non-cyclic GFR-binding peptide
  MOD_RES (14), (15): Xaa is C or S
KYLVSIPSLQTPAXXP

SEQ ID NO: 1406 - protein, 12 aa, Artificial Sequence
  Non-cyclic GFR-binding peptide
FYLVSIANLQVQ

SEQ ID NO: 1407 - protein, 16 aa, Artificial Sequence
  Non-cyclic GFR-binding peptide
  MOD_RES (14), (15): Xaa is C or S
YYLMSTASLETPVXXA

SEQ ID NO: 1408 - protein, 19 aa, Artificial Sequence
  Non-cyclic GFR-binding peptide
  MOD_RES (14), (15): Xaa is C or S
FYLISIANLDQSVXXPSAS

SEQ ID NO: 1409 - protein, 17 aa, Artificial Sequence
  Non-cyclic GFR-binding peptide
  MOD_RES (14), (14): Xaa is C or S
YYLVSTASLKTPAXTPK

SEQ ID NO: 1410 - protein, 18 aa, Artificial Sequence
  Non-cyclic GFR-binding peptide
  MOD_RES (14), (15): Xaa is C or S
KYLISIPSLAQPVXXPAA

SEQ ID NO: 1411 - protein, 20 aa, Artificial Sequence
  Non-cyclic GFR-binding peptide
  MOD_RES (14), (14): Xaa is C or S
YYLVSTASLKTPAXTPKTVH

SEQ ID NO: 1412 - protein, 14 aa, Artificial Sequence
  Non-cyclic GFR-binding peptide
KYLVSIPSLQVQTP

SEQ ID NO: 1413 - protein, 13 aa, Artificial Sequence
  Non-cyclic GFR-binding peptide
YYLVSTASLKTPV

SEQ ID NO: 1414 - protein, 20 aa, Artificial Sequence
  Non-cyclic GFR-binding peptide
  MOD_RES (14), (15): Xaa is C or S
LYLVSIASLKTPAXXPKPVY

SEQ ID NO: 1415 - protein, 16 aa, Artificial Sequence
  Non-cyclic GFR-binding peptide
  MOD_RES (14), (15): Xaa is C or S
FYLISIANLAQPVXXP

SEQ ID NO: 1416 - protein, 10 aa, Artificial Sequence
  Non-cyclic GFR-binding peptide
LYLVSIASLK

SEQ ID NO: 1417 - protein, 14 aa, Artificial Sequence
  Non-cyclic GFR-binding peptide
  MOD_RES (14), (14): Xaa is C or S
KYLVSIPSLKTPAX

SEQ ID NO: 1418 - protein, 15 aa, Artificial Sequence
  Non-cyclic GFR-binding peptide
  MOD_RES (14), (15): Xaa is C or S
LYLISIASLDQSVXX

SEQ ID NO: 1419 - protein, 18 aa, Artificial Sequence
  Non-cyclic GFR-binding peptide
  MOD_RES (14), (15): Xaa is C or S
KYLVSIPSLQTPAXXPKP

SEQ ID NO: 1420 - protein, 20 aa, Artificial Sequence
  Non-cyclic GFR-binding peptide
  MOD_RES (14), (15): Xaa is C or S
FYLVSIANLKTPVXXAKGVK

SEQ ID NO: 1421 - protein, 13 aa, Artificial Sequence
  Non-cyclic GFR-binding peptide
KYLVSIPSLQTPA

SEQ ID NO: 1422 - protein, 18 aa, Artificial Sequence
  Non-cyclic GFR-binding peptide
  MOD_RES (14), (15): Xaa is C or S
YYLISTASLDQSVXXPSA

SEQ ID NO: 1423 - protein, 10 aa, Artificial Sequence
  Non-cyclic GFR-binding peptide
KYLISIPSLA

SEQ ID NO: 1424 - protein, 18 aa, Artificial Sequence
  Non-cyclic GFR-binding peptide
  MOD_RES (14), (15): Xaa is C or S
YYLMSTASLETPVXXAKP

SEQ ID NO: 1425 - protein, 17 aa, Artificial Sequence
  Non-cyclic GFR-binding peptide
  MOD_RES (14), (15): Xaa is C or S
KYLVSIPSLKTPAXXAK

SEQ ID NO: 1426 - protein, 12 aa, Artificial Sequence
  Non-cyclic GFR-binding peptide
YYLISTASLAQP

SEQ ID NO: 1427 - protein, 14 aa, Artificial Sequence
  Non-cyclic GFR-binding peptide
  MOD_RES (14), (14): Xaa is C or S
YYLISTASLAQPVX

SEQ ID NO: 1428 - protein, 12 aa, Artificial Sequence
  Non-cyclic GFR-binding peptide
KYLISIPSLDQP

SEQ ID NO: 1429 - protein, 13 aa, Artificial Sequence
  Non-cyclic GFR-binding peptide
KYLISIPSLAQPV

SEQ ID NO: 1430 - protein, 13 aa, Artificial Sequence
  Non-cyclic GFR-binding peptide
YYLVSTASLQVQT

SEQ ID NO: 1431 - protein, 20 aa, Artificial Sequence
  Non-cyclic GFR-binding peptide
  MOD_RES (14), (15): Xaa is C or S
YYLISTASLAQPVXXPAASA

SEQ ID NO: 1432 - protein, 15 aa, Artificial Sequence
  Non-cyclic GFR-binding peptide
  MOD_RES (14), (15): Xaa is C or S
KYLVSIPSLQTPAXX

SEQ ID NO: 1433 - protein, 11 aa, Artificial Sequence
  Non-cyclic GFR-binding peptide
YYLMSTASLET

SEQ ID NO: 1434 - protein, 19 aa, Artificial Sequence
  Non-cyclic GFR-binding peptide
  MOD_RES (14), (15): Xaa is C or S
LYLISIASLAQPVXXPAAS

SEQ ID NO: 1435 - protein, 15 aa, Artificial Sequence
  Non-cyclic GFR-binding peptide
  MOD_RES (14), (15): Xaa is C or S
FYLMSIANLETPVXX

SEQ ID NO: 1436 - protein, 18 aa, Artificial Sequence
  Non-cyclic GFR-binding peptide
  MOD_RES (14), (15): Xaa is C or S
YYLVSTASLKTPAXXPKP

SEQ ID NO: 1437 - protein, 14 aa, Artificial Sequence
  Non-cyclic GFR-binding peptide
  MOD_RES (14), (14): Xaa is C or S
KYLISIPSLDQPVX

SEQ ID NO: 1438 - protein, 20 aa, Artificial Sequence
  Non-cyclic GFR-binding peptide
  MOD_RES (14), (15): Xaa is C or S
LYLISIASLDQPVXXPSASA

SEQ ID NO: 1439 - protein, 19 aa, Artificial Sequence
  Non-cyclic GFR-binding peptide
  MOD_RES (14), (14): Xaa is C or S
KYLVSIPSLKTPAXTPKTV

SEQ ID NO: 1440 - protein, 15 aa, Artificial Sequence
  Non-cyclic GFR-binding peptide
  MOD_RES (14), (14): Xaa is C or S
LYLVSIASLKTPAXT

SEQ ID NO: 1441 - protein, 18 aa, Artificial Sequence
  Non-cyclic GFR-binding peptide
  MOD_RES (14), (15): Xaa is C or S
KYLVSIPSLKTPAXXAKP

SEQ ID NO: 1442 - protein, 12 aa, Artificial Sequence
  Non-cyclic GFR-binding peptide
LYLVSIASLKTP

SEQ ID NO: 1443 - protein, 15 aa, Artificial Sequence
  Non-cyclic GFR-binding peptide
  MOD_RES (14), (15): Xaa is C or S
KYLISIPSLDQPVXX

SEQ ID NO: 1444 - protein, 15 aa, Artificial Sequence
  Non-cyclic GFR-binding peptide
KYLVSIPSLQVQTPR

SEQ ID NO: 1445 - protein, 17 aa, Artificial Sequence
  Non-cyclic GFR-binding peptide
  MOD_RES (16), (16): Xaa is C or S
FYLVSIANLQVQTPRXQ

SEQ ID NO: 1446 - protein, 13 aa, Artificial Sequence
  Non-cyclic GFR-binding peptide
FYLMSIANLETPV

SEQ ID NO: 1447 - protein, 19 aa, Artificial Sequence
  Non-cyclic GFR-binding peptide
  MOD_RES (14), (15): Xaa is C or S
YYLVSTASLKTPAXXPKPV

SEQ ID NO: 1448 - protein, 20 aa, Artificial Sequence
  Non-cyclic GFR-binding peptide
  MOD_RES (14), (15): Xaa is C or S
KYLISIPSLAQPVXXPAASA

SEQ ID NO: 1449 - protein, 18 aa, Artificial Sequence
  Non-cyclic GFR-binding peptide
  MOD_RES (14), (15): Xaa is C or S
YYLVSTASLQTPAXXPKP

SEQ ID NO: 1450 - protein, 20 aa, Artificial Sequence
  Non-cyclic GFR-binding peptide
  MOD_RES (14), (15): Xaa is C or S
KYLMSIPSLETPVXXAKPIK

SEQ ID NO: 1451 - protein, 17 aa, Artificial Sequence
  Non-cyclic GFR-binding peptide
  MOD_RES (14), (15): Xaa is C or S
YYLVSTASLQTPAXXPK

SEQ ID NO: 1452 - protein, 20 aa, Artificial Sequence
  Non-cyclic GFR-binding peptide
  MOD_RES (14), (15): Xaa is C or S
YYLISTASLDQSVXXPSASA

SEQ ID NO: 1453 - protein, 16 aa, Artificial Sequence
  Non-cyclic GFR-binding peptide
  MOD_RES (14), (15): Xaa is C or S
YYLVSTASLKTPVXXA

SEQ ID NO: 1454 - protein, 12 aa, Artificial Sequence
  Non-cyclic GFR-binding peptide
KYLISIPSLDQS

SEQ ID NO: 1455 - protein, 20 aa, Artificial Sequence
  Non-cyclic GFR-binding peptide
  MOD_RES (14), (15): Xaa is C or S
YYLMSTASLETPVXXAKPIK

SEQ ID NO: 1456 - protein, 17 aa, Artificial Sequence
  Non-cyclic GFR-binding peptide
  MOD_RES (14), (15): Xaa is C or S
KYLVSIPSLKTPAXXPK

SEQ ID NO: 1457 - protein, 17 aa, Artificial Sequence
  Non-cyclic GFR-binding peptide
  MOD_RES (14), (15): Xaa is C or S
KYLVSIPSLQTPAXXPK

SEQ ID NO: 1458 - protein, 12 aa, Artificial Sequence
  Non-cyclic GFR-binding peptide
YYLISTASLDQP

SEQ ID NO: 1459 - protein, 16 aa, Artificial Sequence
  Non-cyclic GFR-binding peptide
  MOD_RES (14), (15): Xaa is C or S
FYLISIANLDQSVXXP

SEQ ID NO: 1460 - protein, 14 aa, Artificial Sequence
  Non-cyclic GFR-binding peptide
  MOD_RES (14), (14): Xaa is C or S
YYLISTASLDQPVX

SEQ ID NO: 1461 - protein, 18 aa, Artificial Sequence
  Non-cyclic GFR-binding peptide
  MOD_RES (16), (16): Xaa is C or S
KYLVSIPSLQVQTPRXQV

SEQ ID NO: 1462 - protein, 14 aa, Artificial Sequence
  Non-cyclic GFR-binding peptide
  MOD_RES (14), (14): Xaa is C or S
KYLISIPSLAQPVX

SEQ ID NO: 1463 - protein, 14 aa, Artificial Sequence
  Non-cyclic GFR-binding peptide
  MOD_RES (14), (14): Xaa is C or S
FYLMSIANLETPVX

SEQ ID NO: 1464 - protein, 17 aa, Artificial Sequence
  Non-cyclic GFR-binding peptide
  MOD_RES (14), (15): Xaa is C or S
LYLISIASLDQSVXXPS

SEQ ID NO: 1465 - protein, 13 aa, Artificial Sequence
  Non-cyclic GFR-binding peptide
KYLVSIPSLQVQT

SEQ ID NO: 1466 - protein, 20 aa, Artificial Sequence
  Non-cyclic GFR-binding peptide
  MOD_RES (16), (16): Xaa is C or S
KYLVSIPSLQVQTPRXQVNR

SEQ ID NO: 1467 - protein, 20 aa, Artificial Sequence
  Non-cyclic GFR-binding peptide
  MOD_RES (14), (15): Xaa is C or S
FYLISIANLDQPVXXPSASA

SEQ ID NO: 1468 - protein, 12 aa, Artificial Sequence
  Non-cyclic GFR-binding peptide
LYLVSIASLQTP

SEQ ID NO: 1469 - protein, 18 aa, Artificial Sequence
  Non-cyclic GFR-binding peptide
  MOD_RES (14), (14): Xaa is C or S
KYLVSIPSLKTPAXTPKT

SEQ ID NO: 1470 - protein, 18 aa, Artificial Sequence
  Non-cyclic GFR-binding peptide
  MOD_RES (14), (15): Xaa is C or S
KYLVSIPSLKTPAXXPKP

SEQ ID NO: 1471 - protein, 14 aa, Artificial Sequence
  Non-cyclic GFR-binding peptide
  MOD_RES (14), (14): Xaa is C or S
FYLVSIANLKTPVX

SEQ ID NO: 1472 - protein, 10 aa, Artificial Sequence
  Non-cyclic GFR-binding peptide
KYLISIPSLD

SEQ ID NO: 1473 - protein, 15 aa, Artificial Sequence
  Non-cyclic GFR-binding peptide
  MOD_RES (14), (15): Xaa is C or S
YYLVSTASLQTPAXX

SEQ ID NO: 1474 - protein, 14 aa, Artificial Sequence
  Non-cyclic GFR-binding peptide
  MOD_RES (14), (14): Xaa is C or S
LYLVSIASLKTPVX

SEQ ID NO: 1475 - protein, 20 aa, Artificial Sequence
  Non-cyclic GFR-binding peptide
  MOD_RES (14), (14): Xaa is C or S
KYLVSIPSLKTPAXTPKTVH

SEQ ID NO: 1476 - protein, 13 aa, Artificial Sequence
  Non-cyclic GFR-binding peptide
KYLVSIPSLKTPA

SEQ ID NO: 1477 - protein, 19 aa, Artificial Sequence
  Non-cyclic GFR-binding peptide
  MOD_RES (14), (14): Xaa is C or S
YYLVSTASLKTPAXTPKTV

SEQ ID NO: 1478 - protein, 16 aa, Artificial Sequence
  Non-cyclic GFR-binding peptide
  MOD_RES (14), (15): Xaa is C or S
LYLISIASLDQSVXXP

SEQ ID NO: 1479 - protein, 13 aa, Artificial Sequence
  Non-cyclic GFR-binding peptide
YYLVSTASLQTPA

SEQ ID NO: 1480 - protein, 19 aa, Artificial Sequence
  Non-cyclic GFR-binding peptide
  MOD_RES (16), (16): Xaa is C or S
KYLVSIPSLQVQTPRXQVN

SEQ ID NO: 1481 - protein, 17 aa, Artificial Sequence
  Non-cyclic GFR-binding peptide
  MOD_RES (14), (15): Xaa is C or S
FYLISIANLDQSVXXPS

SEQ ID NO: 1482 - protein, 11 aa, Artificial Sequence
  Non-cyclic GFR-binding peptide
YYLVSTASLQV

SEQ ID NO: 1483 - protein, 18 aa, Artificial Sequence
  Non-cyclic GFR-binding peptide
  MOD_RES (4), (5): Xaa is C or S
PKAXXVPTELSPISMLYK

SEQ ID NO: 1484 - protein, 13 aa, Artificial Sequence
  Non-cyclic GFR-binding peptide
APTQLSAISVLYL

SEQ ID NO: 1485 - protein, 10 aa, Artificial Sequence
  Non-cyclic GFR-binding peptide
ALSATSILYY

SEQ ID NO: 1486 - protein, 10 aa, Artificial Sequence
  Non-cyclic GFR-binding peptide
ELSPISMLYK

SEQ ID NO: 1487 - protein, 18 aa, Artificial Sequence
  Non-cyclic GFR-binding peptide
  MOD_RES (4), (5): Xaa is C or S
ASPXXVSQDLSPISILYK

SEQ ID NO: 1488 - protein, 19 aa, Artificial Sequence
  Non-cyclic GFR-binding peptide
  MOD_RES (5), (6): Xaa is C or S
SASPXXVSQDLSATSILYY

SEQ ID NO: 1489 - protein, 19 aa, Artificial Sequence
  Non-cyclic GFR-binding peptide
  MOD_RES (5), (6): Xaa is C or S
SASPXXVSQDLSAISILYL

SEQ ID NO: 1490 - protein, 11 aa, Artificial Sequence
  Non-cyclic GFR-binding peptide
QDLNAISILYF

SEQ ID NO: 1491 - protein, 13 aa, Artificial Sequence
  Non-cyclic GFR-binding peptide
VPQALSAISILYL

SEQ ID NO: 1492 - protein, 10 aa, Artificial Sequence
  Non-cyclic GFR-binding peptide
ALSAISILYL

SEQ ID NO: 1493 - protein, 16 aa, Artificial Sequence
  Non-cyclic GFR-binding peptide
  MOD_RES (2), (3): Xaa is C or S
PXXAPTQLSATSVLYY

SEQ ID NO: 1494 - protein, 16 aa, Artificial Sequence
  Non-cyclic GFR-binding peptide
  MOD_RES (2), (3): Xaa is C or S
PXXVPQALSATSILYY

SEQ ID NO: 1495 - protein, 12 aa, Artificial Sequence
  Non-cyclic GFR-binding peptide
PQALSPISILYK

SEQ ID NO: 1496 - protein, 13 aa, Artificial Sequence
  Non-cyclic GFR-binding peptide
VSQDLSATSILYY

SEQ ID NO: 1497 - protein, 10 aa, Artificial Sequence
  Non-cyclic GFR-binding peptide
ELNAISMLYF

SEQ ID NO: 1498 - protein, 18 aa, Artificial Sequence
  Non-cyclic GFR-binding peptide
  MOD_RES (4), (5): Xaa is C or S
ASPXXVPQDLSATSILYY

SEQ ID NO: 1499 - protein, 18 aa, Artificial Sequence
  Non-cyclic GFR-binding peptide
  MOD_RES (4), (5): Xaa is C or S
AAPXXVPQALSATSILYY

SEQ ID NO: 1500 - protein, 20 aa, Artificial Sequence
  Non-cyclic GFR-binding peptide
  MOD_RES (6), (7): Xaa is C or S
TVPKPXXAPTQLSATSVLYY

SEQ ID NO: 1501 - protein, 12 aa, Artificial Sequence
  Non-cyclic GFR-binding peptide
SQDLSAISILYL

SEQ ID NO: 1502 - protein, 18 aa, Artificial Sequence
  Non-cyclic GFR-binding peptide
  MOD_RES (4), (5): Xaa is C or S
PKAXXAPTKLNAISVLYF

SEQ ID NO: 1503 - protein, 17 aa, Artificial Sequence
  Non-cyclic GFR-binding peptide
  MOD_RES (2), (2): Xaa is C or S
QXRPTQVQLSPISVLYK

SEQ ID NO: 1504 - protein, 20 aa, Artificial Sequence
  Non-cyclic GFR-binding peptide
  MOD_RES (5), (5): Xaa is C or S
RNVQXRPTQVQLSATSVLYY

SEQ ID NO: 1505 - protein, 18 aa, Artificial Sequence
  Non-cyclic GFR-binding peptide
  MOD_RES (3), (3): Xaa is C or S
VQXRPTQVQLSAISVLYL

SEQ ID NO: 1506 - protein, 16 aa, Artificial Sequence
  Non-cyclic GFR-binding peptide
  MOD_RES (2), (3): Xaa is C or S
PXXVPQALSAISILYL

SEQ ID NO: 1507 - protein, 12 aa, Artificial Sequence
  Non-cyclic GFR-binding peptide
PTQLSPISVLYK

SEQ ID NO: 1508 - protein, 16 aa, Artificial Sequence
  Non-cyclic GFR-binding peptide
  MOD_RES (2), (3): Xaa is C or S
PXXAPTQLSAISVLYL

SEQ ID NO: 1509 - protein, 17 aa, Artificial Sequence
  Non-cyclic GFR-binding peptide
  MOD_RES (2), (2): Xaa is C or S
QXRPTQVQLSAISVLYL

SEQ ID NO: 1510 - protein, 19 aa, Artificial Sequence
  Non-cyclic GFR-binding peptide
  MOD_RES (5), (6): Xaa is C or S
VPKPXXAPTQLSATSVLYY

SEQ ID NO: 1511 - protein, 13 aa, Artificial Sequence
  Non-cyclic GFR-binding peptide
VSQDLSAISILYL

SEQ ID NO: 1512 - protein, 14 aa, Artificial Sequence
  Non-cyclic GFR-binding peptide
PTQVQLNAISVLYF

SEQ ID NO: 1513 - protein, 17 aa, Artificial Sequence
  Non-cyclic GFR-binding peptide
  MOD_RES (3), (4): Xaa is C or S
SPXXVPQDLNAISILYF

SEQ ID NO: 1514 - protein, 16 aa, Artificial Sequence
  Non-cyclic GFR-binding peptide
  MOD_RES (2), (3): Xaa is C or S
AXXAPTKLSAISVLYL

SEQ ID NO: 1515 - protein, 20 aa, Artificial Sequence
  Non-cyclic GFR-binding peptide
  MOD_RES (6), (7): Xaa is C or S
AVPKAXXAPTKLNAISVLYF

SEQ ID NO: 1516 - protein, 18 aa, Artificial Sequence
  Non-cyclic GFR-binding peptide
  MOD_RES (4), (5): Xaa is C or S
ASPXXVPQDLSAISILYL

SEQ ID NO: 1517 - protein, 15 aa, Artificial Sequence
  Non-cyclic GFR-binding peptide
  MOD_RES (1), (2): Xaa is C or S
XXVPQALSAISILYL

SEQ ID NO: 1518 - protein, 18 aa, Artificial Sequence
  Non-cyclic GFR-binding peptide
  MOD_RES (4), (5): Xaa is C or S
GKAXXVPTKLSAISVLYL

SEQ ID NO: 1519 - protein, 11 aa, Artificial Sequence
  Non-cyclic GFR-binding peptide
QDLSPISILYK

SEQ ID NO: 1520 - protein, 18 aa, Artificial Sequence
  Non-cyclic GFR-binding peptide
  MOD_RES (3), (3): Xaa is C or S
VQXRPTQVQLSATSVLYY

SEQ ID NO: 1521 - protein, 9 aa, Artificial Sequence
  Non-cyclic GFR-binding peptide
LSATSMLYY

SEQ ID NO: 1522 - protein, 18 aa, Artificial Sequence
  Non-cyclic GFR-binding peptide
  MOD_RES (4), (5): Xaa is C or S
PKAXXVPTELNAISMLYF

SEQ ID NO: 1523 - protein, 13 aa, Artificial Sequence
  Non-cyclic GFR-binding peptide
VPQALSATSILYY

SEQ ID NO: 1524 - protein, 15 aa, Artificial Sequence
  Non-cyclic GFR-binding peptide
  MOD_RES (2), (2): Xaa is C or S
TXAPTKLSATSVLYY

SEQ ID NO: 1525 - protein, 11 aa, Artificial Sequence
  Non-cyclic GFR-binding peptide
TELSPISMLYK

SEQ ID NO: 1526 - protein, 17 aa, Artificial Sequence
  Non-cyclic GFR-binding peptide
  MOD_RES (2), (2): Xaa is C or S
QXRPTQVQLSATSVLYY

SEQ ID NO: 1527 - protein, 17 aa, Artificial Sequence
  Non-cyclic GFR-binding peptide
  MOD_RES (3), (4): Xaa is C or S
APXXVPQALSPISILYK

SEQ ID NO: 1528 - protein, 18 aa, Artificial Sequence
  Non-cyclic GFR-binding peptide
  MOD_RES (4), (5): Xaa is C or S
GKAXXVPTKLNAISVLYF

SEQ ID NO: 1529 - protein, 20 aa, Artificial Sequence
  Non-cyclic GFR-binding peptide
  MOD_RES (6), (7): Xaa is C or S
SIPKAXXVPTELSATSMLYY

SEQ ID NO: 1530 - protein, 15 aa, Artificial Sequence
  Non-cyclic GFR-binding peptide
  MOD_RES (1), (2): Xaa is C or S
XXVPQALSATSILYY

SEQ ID NO: 1531 - protein, 17 aa, Artificial Sequence
  Non-cyclic GFR-binding peptide
  MOD_RES (3), (4): Xaa is C or S
KAXXVPTELNAISMLYF

SEQ ID NO: 1532 - protein, 17 aa, Artificial Sequence
  Non-cyclic GFR-binding peptide
  MOD_RES (3), (4): Xaa is C or S
APXXVPQALNAISILYF

SEQ ID NO: 1533 - protein, 18 aa, Artificial Sequence
  Non-cyclic GFR-binding peptide
  MOD_RES (4), (5): Xaa is C or S
AAPXXVPQALSAISILYL

SEQ ID NO: 1534 - protein, 20 aa, Artificial Sequence
  Non-cyclic GFR-binding peptide
  MOD_RES (6), (7): Xaa is C or S
TVPKPXXAPTQLSAISVLYL

SEQ ID NO: 1535 - protein, 19 aa, Artificial Sequence
  Non-cyclic GFR-binding peptide
  MOD_RES (5), (6): Xaa is C or S
VPKPXXAPTQLSAISVLYL

SEQ ID NO: 1536 - protein, 11 aa, Artificial Sequence
  Non-cyclic GFR-binding peptide
TELNAISMLYF

SEQ ID NO: 1537 - protein, 17 aa, Artificial Sequence
  Non-cyclic GFR-binding peptide
  MOD_RES (3), (4): Xaa is C or S
KAXXVPTELSPISMLYK

SEQ ID NO: 1538 - protein, 12 aa, Artificial Sequence
  Non-cyclic GFR-binding peptide
SQDLSATSILYY

SEQ ID NO: 1539 - protein, 14 aa, Artificial Sequence
  Non-cyclic GFR-binding peptide
  MOD_RES (1), (1): Xaa is C or S
XVPQALSAISILYL

SEQ ID NO: 1540 - protein, 20 aa, Artificial Sequence
  Non-cyclic GFR-binding peptide
  MOD_RES (7), (7): Xaa is C or S
HVTKPTXAPTKLSAISVLYL

SEQ ID NO: 1541 - protein, 20 aa, Artificial Sequence
  Non-cyclic GFR-binding peptide
  MOD_RES (6), (7): Xaa is C or S
TVPKPXXAPTQLSPISVLYK

SEQ ID NO: 1542 - protein, 18 aa, Artificial Sequence
  Non-cyclic GFR-binding peptide
  MOD_RES (4), (5): Xaa is C or S
ASPXXVPQDLSPISILYK

SEQ ID NO: 1543 - protein, 13 aa, Artificial Sequence
  Non-cyclic GFR-binding peptide
APTKLSAISVLYL

SEQ ID NO: 1544 - protein, 19 aa, Artificial Sequence
  Non-cyclic GFR-binding peptide
  MOD_RES (5), (6): Xaa is C or S
SAAPXXVPQALSATSILYY

SEQ ID NO: 1545 - protein, 17 aa, Artificial Sequence
  Non-cyclic GFR-binding peptide
  MOD_RES (3), (4): Xaa is C or S
KAXXAPTKLNAISVLYF

SEQ ID NO: 1546 - protein, 17 aa, Artificial Sequence
  Non-cyclic GFR-binding peptide
  MOD_RES (3), (4): Xaa is C or S
SPXXVPQDLSPISILYK

SEQ ID NO: 1547 - protein, 19 aa, Artificial Sequence
  Non-cyclic GFR-binding peptide
  MOD_RES (5), (6): Xaa is C or S
SASPXXVPQDLSATSILYY

SEQ ID NO: 1548 - protein, 16 aa, Artificial Sequence
  Non-cyclic GFR-binding peptide
  MOD_RES (1), (1): Xaa is C or S
XRPTQVQLSAISVLYL

SEQ ID NO: 1549 - protein, 19 aa, Artificial Sequence
  Non-cyclic GFR-binding peptide
  MOD_RES (5), (6): Xaa is C or S
VPKAXXAPTKLSAISVLYL

SEQ ID NO: 1550 - protein, 20 aa, Artificial Sequence
  Non-cyclic GFR-binding peptide
  MOD_RES (6), (7): Xaa is C or S
AVPKAXXAPTKLSPISVLYK

SEQ ID NO: 1551 - protein, 16 aa, Artificial Sequence
  Non-cyclic GFR-binding peptide
  MOD_RES (2), (3): Xaa is C or S
PXXVPQALSPISILYK

SEQ ID NO: 1552 - protein, 20 aa, Artificial Sequence
  Non-cyclic GFR-binding peptide
  MOD_RES (5), (5): Xaa is C or S
RNVQXRPTQVQLNAISVLYF

SEQ ID NO: 1553 - protein, 16 aa, Artificial Sequence
  Non-cyclic GFR-binding peptide
  MOD_RES (2), (3): Xaa is C or S
PXXAPTKLSATSVLYY

SEQ ID NO: 1554 - protein, 19 aa, Artificial Sequence
  Non-cyclic GFR-binding peptide
  MOD_RES (5), (6): Xaa is C or S
SASPXXVPQDLSAISILYL

SEQ ID NO: 1555 - protein, 17 aa, Artificial Sequence
  Non-cyclic GFR-binding peptide
  MOD_RES (3), (4): Xaa is C or S
KAXXVPTKLNAISVLYF

SEQ ID NO: 1556 - protein, 15 aa, Artificial Sequence
  Non-cyclic GFR-binding peptide
RPTQVQLNAISVLYF

SEQ ID NO: 1557 - protein, 19 aa, Artificial Sequence
  Non-cyclic GFR-binding peptide
  MOD_RES (5), (6): Xaa is C or S
SASPXXVSQDLSPISILYK

SEQ ID NO: 1558 - protein, 17 aa, Artificial Sequence
  Non-cyclic GFR-binding peptide
  MOD_RES (4), (4): Xaa is C or S
KPTXAPTKLSAISVLYL

SEQ ID NO: 1559 - protein, 15 aa, Artificial Sequence
  Non-cyclic GFR-binding peptide
  MOD_RES (1), (2): Xaa is C or S
XXVPQDLNAISILYF

SEQ ID NO: 1560 - protein, 14 aa, Artificial Sequence
  Non-cyclic GFR-binding peptide
  MOD_RES (1), (1): Xaa is C or S
XVPTELSPISMLYK

SEQ ID NO: 1561 - protein, 17 aa, Artificial Sequence
  Non-cyclic GFR-binding peptide
  MOD_RES (3), (4): Xaa is C or S
SPXXVSQDLSATSILYY

SEQ ID NO: 1562 - protein, 11 aa, Artificial Sequence
  Non-cyclic GFR-binding peptide
TKLSAISVLYL

SEQ ID NO: 1563 - protein, 11 aa, Artificial Sequence
  Non-cyclic GFR-binding peptide
QALSATSILYY

SEQ ID NO: 1564 - protein, 11 aa, Artificial Sequence
  Non-cyclic GFR-binding peptide
QDLSATSILYY

SEQ ID NO: 1565 - protein, 12 aa, Artificial Sequence
  Non-cyclic GFR-binding peptide
PTELSATSMLYY

SEQ ID NO: 1566 - protein, 20 aa, Artificial Sequence
  Non-cyclic GFR-binding peptide
  MOD_RES (6), (7): Xaa is C or S
KIPKAXXVPTELNAISMLYF

SEQ ID NO: 1567 - protein, 18 aa, Artificial Sequence
  Non-cyclic GFR-binding peptide
  MOD_RES (3), (3): Xaa is C or S
VQXRPTQVQLNAISVLYF

SEQ ID NO: 1568 - protein, 17 aa, Artificial Sequence
  Non-cyclic GFR-binding peptide
  MOD_RES (3), (4): Xaa is C or S
KPXXAPTKLSAISVLYL

SEQ ID NO: 1569 - protein, 12 aa, Artificial Sequence
  Non-cyclic GFR-binding peptide
SQDLNAISILYF

SEQ ID NO: 1570 - protein, 18 aa, Artificial Sequence
  Non-cyclic GFR-binding peptide
  MOD_RES (4), (5): Xaa is C or S
PKAXXAPTKLSAISVLYL

SEQ ID NO: 1571 - protein, 11 aa, Artificial Sequence
  Non-cyclic GFR-binding peptide
VQLNAISVLYF

SEQ ID NO: 1572 - protein, 10 aa, Artificial Sequence
  Non-cyclic GFR-binding peptide
ALNAISILYF

SEQ ID NO: 1573 - protein, 15 aa, Artificial Sequence
  Non-cyclic GFR-binding peptide
  MOD_RES (1), (2): Xaa is C or S
XXVPQALNAISILYF

SEQ ID NO: 1574 - protein, 13 aa, Artificial Sequence
  Non-cyclic GFR-binding peptide
VPQDLSAISILYL

SEQ ID NO: 1575 - protein, 13 aa, Artificial Sequence
  Non-cyclic GFR-binding peptide
VPQALNAISILYF

SEQ ID NO: 1576 - protein, 12 aa, Artificial Sequence
  Non-cyclic GFR-binding peptide
PTELSPISMLYK

SEQ ID NO: 1577 - protein, 14 aa, Artificial Sequence
  Non-cyclic GFR-binding peptide
  MOD_RES (1), (1): Xaa is C or S
XVPTELSATSMLYY

SEQ ID NO: 1578 - protein, 14 aa, Artificial Sequence
  Non-cyclic GFR-binding peptide
  MOD_RES (1), (1): Xaa is C or S
XVPQDLSAISILYL

SEQ ID NO: 1579 - protein, 9 aa, Artificial Sequence
  Non-cyclic GFR-binding peptide
LSPISMLYK

SEQ ID NO: 1580 - protein, 15 aa, Artificial Sequence
  Non-cyclic GFR-binding peptide
  MOD_RES (2), (2): Xaa is C or S
TXAPTKLSPISVLYK

SEQ ID NO: 1581 - protein, 18 aa, Artificial Sequence
  Non-cyclic GFR-binding peptide
  MOD_RES (4), (5): Xaa is C or S
PKPXXAPTKLSAISVLYL

SEQ ID NO: 1582 - protein, 16 aa, Artificial Sequence
  Non-cyclic GFR-binding peptide
  MOD_RES (2), (3): Xaa is C or S
PXXVPQDLSATSILYY

SEQ ID NO: 1583 - protein, 14 aa, Artificial Sequence
  Non-cyclic GFR-binding peptide
  MOD_RES (1), (1): Xaa is C or S
XVSQDLNAISILYF

SEQ ID NO: 1584 - protein, 18 aa, Artificial Sequence
  Non-cyclic GFR-binding peptide
  MOD_RES (4), (5): Xaa is C or S
GKAXXVPTKLSATSVLYY

SEQ ID NO: 1585 - protein, 15 aa, Artificial Sequence
  Non-cyclic GFR-binding peptide
  MOD_RES (1), (2): Xaa is C or S
XXVPTELSPISMLYK

SEQ ID NO: 1586 - protein, 16 aa, Artificial Sequence
  Non-cyclic GFR-binding peptide
  MOD_RES (2), (3): Xaa is C or S
PXXVSQDLSATSILYY

SEQ ID NO: 1587 - protein, 14 aa, Artificial Sequence
  Non-cyclic GFR-binding peptide
  MOD_RES (1), (1): Xaa is C or S
XVPQDLNAISILYF

SEQ ID NO: 1588 - protein, 13 aa, Artificial Sequence
  Non-cyclic GFR-binding peptide
VPQDLNAISILYF

SEQ ID NO: 1589 - protein, 20 aa, Artificial Sequence
  Non-cyclic GFR-binding peptide
  MOD_RES (6), (7): Xaa is C or S
ASASPXXVPQDLSPISILYK

SEQ ID NO: 1590 - protein, 15 aa, Artificial Sequence
  Non-cyclic GFR-binding peptide
  MOD_RES (1), (2): Xaa is C or S
XXVSQDLSATSILYY

SEQ ID NO: 1591 - protein, 15 aa, Artificial Sequence
  Non-cyclic GFR-binding peptide
  MOD_RES (1), (2): Xaa is C or S
XXAPTKLSAISVLYL

SEQ ID NO: 1592 - protein, 19 aa, Artificial Sequence
  Non-cyclic GFR-binding peptide
  MOD_RES (5), (6): Xaa is C or S
VGKAXXVPTKLNAISVLYF

SEQ ID NO: 1593 - protein, 16 aa, Artificial Sequence
  Non-cyclic GFR-binding peptide
  MOD_RES (2), (3): Xaa is C or S
AXXVPTKLNAISVLYF

SEQ ID NO: 1594 - protein, 9 aa, Artificial Sequence
  Non-cyclic GFR-binding peptide
LSAISILYL

SEQ ID NO: 1595 - protein, 16 aa, Artificial Sequence
  Non-cyclic GFR-binding peptide
  MOD_RES (2), (3): Xaa is C or S
PXXVSQDLSPISILYK

SEQ ID NO: 1596 - protein, 10 aa, Artificial Sequence
  Non-cyclic GFR-binding peptide
DLNAISILYF

SEQ ID NO: 1597 - protein, 15 aa, Artificial Sequence
  Non-cyclic GFR-binding peptide
  MOD_RES (1), (2): Xaa is C or S
XXAPTQLSAISVLYL

SEQ ID NO: 1598 - protein, 18 aa, Artificial Sequence
  Non-cyclic GFR-binding peptide
  MOD_RES (4), (5): Xaa is C or S
PKPXXAPTQLSAISVLYL

SEQ ID NO: 1599 - protein, 20 aa, Artificial Sequence
  Non-cyclic GFR-binding peptide
  MOD_RES (6), (7): Xaa is C or S
ASAAPXXVPQALNAISILYF

SEQ ID NO: 1600 - protein, 19 aa, Artificial Sequence
  Non-cyclic GFR-binding peptide
  MOD_RES (6), (6): Xaa is C or S
VTKPTXAPTKLSAISVLYL

SEQ ID NO: 1601 - protein, 13 aa, Artificial Sequence
  Non-cyclic GFR-binding peptide
TQVQLSAISVLYL

SEQ ID NO: 1602 - protein, 20 aa, Artificial Sequence
  Non-cyclic GFR-binding peptide
  MOD_RES (6), (7): Xaa is C or S
ASAAPXXVPQALSAISILYL

SEQ ID NO: 1603 - protein, 13 aa, Artificial Sequence
  Non-cyclic GFR-binding peptide
TQVQLNAISVLYF

SEQ ID NO: 1604 - protein, 18 aa, Artificial Sequence
  Non-cyclic GFR-binding peptide
  MOD_RES (4), (5): Xaa is C or S
ASPXXVSQDLNAISILYF

SEQ ID NO: 1605 - protein, 12 aa, Artificial Sequence
  Non-cyclic GFR-binding peptide
PQALSAISILYL

SEQ ID NO: 1606 - protein, 20 aa, Artificial Sequence
  Non-cyclic GFR-binding peptide
  MOD_RES (6), (7): Xaa is C or S
YVPKPXXAPTKLSATSVLYY

SEQ ID NO: 1607 - protein, 16 aa, Artificial Sequence
  Non-cyclic GFR-binding peptide
  MOD_RES (2), (3): Xaa is C or S
AXXVPTKLSAISVLYL

SEQ ID NO: 1608 - protein, 12 aa, Artificial Sequence
  Non-cyclic GFR-binding peptide
PQALNAISILYF

SEQ ID NO: 1609 - protein, 12 aa, Artificial Sequence
  Non-cyclic GFR-binding peptide
PQDLSAISILYL

SEQ ID NO: 1610 - protein, 19 aa, Artificial Sequence
  Non-cyclic GFR-binding peptide
  MOD_RES (4), (4): Xaa is C or S
NVQXRPTQVQLNAISVLYF

SEQ ID NO: 1611 - protein, 12 aa, Artificial Sequence
  Non-cyclic GFR-binding peptide
PTQLSATSVLYY

SEQ ID NO: 1612 - protein, 10 aa, Artificial Sequence
  Non-cyclic GFR-binding peptide
ELSATSMLYY

SEQ ID NO: 1613 - protein, 18 aa, Artificial Sequence
  Non-cyclic GFR-binding peptide
  MOD_RES (5), (5): Xaa is C or S
TKPTXAPTKLSAISVLYL

SEQ ID NO: 1614 - protein, 19 aa, Artificial Sequence
  Non-cyclic GFR-binding peptide
  MOD_RES (5), (6): Xaa is C or S
IPKAXXVPTELSATSMLYY

SEQ ID NO: 1615 - protein, 20 aa, Artificial Sequence
  Non-cyclic GFR-binding peptide
  MOD_RES (5), (5): Xaa is C or S
RNVQXRPTQVQLSAISVLYL

SEQ ID NO: 1616 - protein, 15 aa, Artificial Sequence
  Non-cyclic GFR-binding peptide
RPTQVQLSAISVLYL

SEQ ID NO: 1617 - protein, 17 aa, Artificial Sequence
  Non-cyclic GFR-binding peptide
  MOD_RES (3), (4): Xaa is C or S
KPXXAPTQLSAISVLYL

SEQ ID NO: 1618 - protein, 18 aa, Artificial Sequence
  Non-cyclic GFR-binding peptide
  MOD_RES (4), (5): Xaa is C or S
ASPXXVSQDLSAISILYL

SEQ ID NO: 1619 - protein, 9 aa, Artificial Sequence
  Non-cyclic GFR-binding peptide
LNAISILYF

SEQ ID NO: 1620 - protein, 17 aa, Artificial Sequence
  Non-cyclic GFR-binding peptide
  MOD_RES (3), (4): Xaa is C or S
KAXXVPTKLSATSVLYY

SEQ ID NO: 1621 - protein, 17 aa, Artificial Sequence
  Non-cyclic GFR-binding peptide
  MOD_RES (3), (4): Xaa is C or S
SPXXVSQDLSPISILYK

SEQ ID NO: 1622 - protein, 14 aa, Artificial Sequence
  Non-cyclic GFR-binding peptide
  MOD_RES (1), (1): Xaa is C or S
XVPQALNAISILYF

SEQ ID NO: 1623 - protein, 17 aa, Artificial Sequence
  Non-cyclic GFR-binding peptide
  MOD_RES (3), (4): Xaa is C or S
KAXXAPTKLSAISVLYL

SEQ ID NO: 1624 - protein, 10 aa, Artificial Sequence
  Non-cyclic GFR-binding peptide
QLSAISVLYL

SEQ ID NO: 1625 - protein, 15 aa, Artificial Sequence
  Non-cyclic GFR-binding peptide
  MOD_RES (1), (2): Xaa is C or S
XXAPTKLSPISVLYK

SEQ ID NO: 1626 - protein, 11 aa, Artificial Sequence
  Non-cyclic GFR-binding peptide
VQLSAISVLYL

SEQ ID NO: 1627 - protein, 12 aa, Artificial Sequence
  Non-cyclic GFR-binding peptide
QVQLSAISVLYL

SEQ ID NO: 1628 - protein, 16 aa, Artificial Sequence
  Non-cyclic GFR-binding peptide
  MOD_RES (2), (3): Xaa is C or S
PXXAPTKLSPISVLYK

SEQ ID NO: 1629 - protein, 19 aa, Artificial Sequence
  Non-cyclic GFR-binding peptide
  MOD_RES (5), (6): Xaa is C or S
SAAPXXVPQALSPISILYK

SEQ ID NO: 1630 - protein, 19 aa, Artificial Sequence
  Non-cyclic GFR-binding peptide
  MOD_RES (5), (6): Xaa is C or S
SAAPXXVPQALNAISILYF

SEQ ID NO: 1631 - protein, 19 aa, Artificial Sequence
  Non-cyclic GFR-binding peptide
  MOD_RES (5), (6): Xaa is C or S
IPKAXXVPTELSPISMLYK

SEQ ID NO: 1632 - protein, 13 aa, Artificial Sequence
  Non-cyclic GFR-binding peptide
VPQDLSPISILYK

SEQ ID NO: 1633 - protein, 10 aa, Artificial Sequence
  Non-cyclic GFR-binding peptide
QLSATSVLYY

SEQ ID NO: 1634 - protein, 19 aa, Artificial Sequence
  Non-cyclic GFR-binding peptide
  MOD_RES (4), (4): Xaa is C or S
NVQXRPTQVQLSATSVLYY

SEQ ID NO: 1635 - protein, 14 aa, Artificial Sequence
  Non-cyclic GFR-binding peptide
  MOD_RES (1), (1): Xaa is C or S
XAPTQLSPISVLYK

SEQ ID NO: 1636 - protein, 12 aa, Artificial Sequence
  Non-cyclic GFR-binding peptide
PTELNAISMLYF

SEQ ID NO: 1637 - protein, 12 aa, Artificial Sequence
  Non-cyclic GFR-binding peptide
QVQLSATSVLYY

SEQ ID NO: 1638 - protein, 17 aa, Artificial Sequence
  Non-cyclic GFR-binding peptide
  MOD_RES (3), (4): Xaa is C or S
SPXXVPQDLSATSILYY

SEQ ID NO: 1639 - protein, 16 aa, Artificial Sequence
  Non-cyclic GFR-binding peptide
  MOD_RES (2), (3): Xaa is C or S
AXXVPTELSPISMLYK

SEQ ID NO: 1640 - protein, 19 aa, Artificial Sequence
  Non-cyclic GFR-binding peptide
  MOD_RES (4), (4): Xaa is C or S
NVQXRPTQVQLSAISVLYL

SEQ ID NO: 1641 - protein, 15 aa, Artificial Sequence
  Non-cyclic GFR-binding peptide
RPTQVQLSATSVLYY

SEQ ID NO: 1642 - protein, 14 aa, Artificial Sequence
  Non-cyclic GFR-binding peptide
PTQVQLSATSVLYY

SEQ ID NO: 1643 - protein, 9 aa, Artificial Sequence
  Non-cyclic GFR-binding peptide
LSATSILYY

SEQ ID NO: 1644 - protein, 17 aa, Artificial Sequence
  Non-cyclic GFR-binding peptide
  MOD_RES (3), (4): Xaa is C or S
KAXXVPTELSATSMLYY

SEQ ID NO: 1645 - protein, 18 aa, Artificial Sequence
  Non-cyclic GFR-binding peptide
  MOD_RES (5), (5): Xaa is C or S
TKPTXAPTKLSATSVLYY

SEQ ID NO: 1646 - protein, 13 aa, Artificial Sequence
  Non-cyclic GFR-binding peptide
VPTELSPISMLYK

SEQ ID NO: 1647 - protein, 16 aa, Artificial Sequence
  Non-cyclic GFR-binding peptide
  MOD_RES (1), (1): Xaa is C or S
XRPTQVQLSPISVLYK

SEQ ID NO: 1648 - protein, 13 aa, Artificial Sequence
  Non-cyclic GFR-binding peptide
VPTKLNAISVLYF

SEQ ID NO: 1649 - protein, 14 aa, Artificial Sequence
  Non-cyclic GFR-binding peptide
  MOD_RES (1), (1): Xaa is C or S
XVSQDLSPISILYK

SEQ ID NO: 1650 - protein, 19 aa, Artificial Sequence
  Non-cyclic GFR-binding peptide
  MOD_RES (5), (6): Xaa is C or S
VPKAXXAPTKLNAISVLYF

SEQ ID NO: 1651 - protein, 12 aa, Artificial Sequence
  Non-cyclic GFR-binding peptide
PQDLNAISILYF

SEQ ID NO: 1652 - protein, 14 aa, Artificial Sequence
  Non-cyclic GFR-binding peptide
  MOD_RES (1), (1): Xaa is C or S
XAPTKLSAISVLYL

SEQ ID NO: 1653 - protein, 16 aa, Artificial Sequence
  Non-cyclic GFR-binding peptide
  MOD_RES (1), (1): Xaa is C or S
XRPTQVQLNAISVLYF

SEQ ID NO: 1654 - protein, 17 aa, Artificial Sequence
  Non-cyclic GFR-binding peptide
  MOD_RES (3), (4): Xaa is C or S
SPXXVPQDLSAISILYL

SEQ ID NO: 1655 - protein, 19 aa, Artificial Sequence
  Non-cyclic GFR-binding peptide
  MOD_RES (5), (6): Xaa is C or S
VPKPXXAPTKLSAISVLYL

SEQ ID NO: 1656 - protein, 19 aa, Artificial Sequence
  Non-cyclic GFR-binding peptide
  MOD_RES (5), (6): Xaa is C or S
IPKAXXVPTELNAISMLYF

SEQ ID NO: 1657 - protein, 14 aa, Artificial Sequence
  Non-cyclic GFR-binding peptide
  MOD_RES (1), (1): Xaa is C or S
XVPTKLSATSVLYY

SEQ ID NO: 1658 - protein, 20 aa, Artificial Sequence
  Non-cyclic GFR-binding peptide
  MOD_RES (6), (7): Xaa is C or S
SIPKAXXVPTELSPISMLYK

SEQ ID NO: 1659 - protein, 19 aa, Artificial Sequence
  Non-cyclic GFR-binding peptide
  MOD_RES (5), (6): Xaa is C or S
SASPXXVPQDLNAISILYF

SEQ ID NO: 1660 - protein, 19 aa, Artificial Sequence
  Non-cyclic GFR-binding peptide
  MOD_RES (5), (6): Xaa is C or S
VGKAXXVPTKLSAISVLYL

SEQ ID NO: 1661 - protein, 20 aa, Artificial Sequence
  Non-cyclic GFR-binding peptide
  MOD_RES (6), (7): Xaa is C or S
SIPKAXXVPTELNAISMLYF

SEQ ID NO: 1662 - protein, 19 aa, Artificial Sequence
  Non-cyclic GFR-binding peptide
  MOD_RES (5), (6): Xaa is C or S
VPKAXXAPTKLSPISVLYK

SEQ ID NO: 1663 - protein, 16 aa, Artificial Sequence
  Non-cyclic GFR-binding peptide
  MOD_RES (2), (3): Xaa is C or S
AXXVPTELNAISMLYF

SEQ ID NO: 1664 - protein, 17 aa, Artificial Sequence
  Non-cyclic GFR-binding peptide
  MOD_RES (3), (4): Xaa is C or S
APXXVPQALSATSILYY

SEQ ID NO: 1665 - protein, 15 aa, Artificial Sequence
  Non-cyclic GFR-binding peptide
  MOD_RES (1), (2): Xaa is C or S
XXVPQDLSAISILYL

SEQ ID NO: 1666 - protein, 10 aa, Artificial Sequence
  Non-cyclic GFR-binding peptide
DLSAISILYL

SEQ ID NO: 1667 - protein, 17 aa, Artificial Sequence
  Non-cyclic GFR-binding peptide
  MOD_RES (3), (4): Xaa is C or S
KAXXVPTKLSAISVLYL

SEQ ID NO: 1668 - protein, 19 aa, Artificial Sequence
  Non-cyclic GFR-binding peptide
  MOD_RES (5), (6): Xaa is C or S
SASPXXVPQDLSPISILYK

SEQ ID NO: 1669 - protein, 9 aa, Artificial Sequence
  Non-cyclic GFR-binding peptide
LNAISMLYF

SEQ ID NO: 1670 - protein, 20 aa, Artificial Sequence
  Non-cyclic GFR-binding peptide
  MOD_RES (6), (7): Xaa is C or S
AVPKAXXAPTKLSAISVLYL

SEQ ID NO: 1671 - protein, 20 aa, Artificial Sequence
  Non-cyclic GFR-binding peptide
  MOD_RES (6), (7): Xaa is C or S
YVPKPXXAPTKLSPISVLYK

SEQ ID NO: 1672 - protein, 10 aa, Artificial Sequence
  Non-cyclic GFR-binding peptide
DLSATSILYY

SEQ ID NO: 1673 - protein, 16 aa, Artificial Sequence
  Non-cyclic GFR-binding peptide
  MOD_RES (2), (3): Xaa is C or S
AXXAPTKLNAISVLYF

SEQ ID NO: 1674 - protein, 16 aa, Artificial Sequence
  Non-cyclic GFR-binding peptide
  MOD_RES (3), (3): Xaa is C or S
PTXAPTKLSATSVLYY

SEQ ID NO: 1675 - protein, 11 aa, Artificial Sequence
  Non-cyclic GFR-binding peptide
TQLSATSVLYY

SEQ ID NO: 1676 - protein, 17 aa, Artificial Sequence
  Non-cyclic GFR-binding peptide
  MOD_RES (3), (4): Xaa is C or S
APXXVPQALSAISILYL

SEQ ID NO: 1677 - protein, 15 aa, Artificial Sequence
  Non-cyclic GFR-binding peptide
  MOD_RES (1), (2): Xaa is C or S
XXVPTKLSAISVLYL

SEQ ID NO: 1678 - protein, 16 aa, Artificial Sequence
  Non-cyclic GFR-binding peptide
  MOD_RES (3), (3): Xaa is C or S
PTXAPTKLSAISVLYL

SEQ ID NO: 1679 - protein, 14 aa, Artificial Sequence
  Non-cyclic GFR-binding peptide
  MOD_RES (1), (1): Xaa is C or S
XVSQDLSAISILYL

SEQ ID NO: 1680 - protein, 15 aa, Artificial Sequence
  Non-cyclic GFR-binding peptide
  MOD_RES (1), (2): Xaa is C or S
XXVPTKLNAISVLYF

SEQ ID NO: 1681 - protein, 19 aa, Artificial Sequence
  Non-cyclic GFR-binding peptide
  MOD_RES (5), (6): Xaa is C or S
VGKAXXVPTKLSATSVLYY

SEQ ID NO: 1682 - protein, 9 aa, Artificial Sequence
  Non-cyclic GFR-binding peptide
LSAISVLYL

SEQ ID NO: 1683 - protein, 11 aa, Artificial Sequence
  Non-cyclic GFR-binding peptide
VQLSPISVLYK

SEQ ID NO: 1684 - protein, 11 aa, Artificial Sequence
  Non-cyclic GFR-binding peptide
QALSAISILYL

SEQ ID NO: 1685 - protein, 11 aa, Artificial Sequence
  Non-cyclic GFR-binding peptide
TQLSPISVLYK

SEQ ID NO: 1686 - protein, 16 aa, Artificial Sequence
  Non-cyclic GFR-binding peptide
  MOD_RES (2), (3): Xaa is C or S
PXXVPQDLSAISILYL

SEQ ID NO: 1687 - protein, 20 aa, Artificial Sequence
  Non-cyclic GFR-binding peptide
  MOD_RES (6), (7): Xaa is C or S
ASASPXXVPQDLSATSILYY

SEQ ID NO: 1688 - protein, 17 aa, Artificial Sequence
  Non-cyclic GFR-binding peptide
  MOD_RES (3), (4): Xaa is C or S
KPXXAPTKLSATSVLYY

SEQ ID NO: 1689 - protein, 15 aa, Artificial Sequence
  Non-cyclic GFR-binding peptide
  MOD_RES (1), (2): Xaa is C or S
XXVPTKLSATSVLYY

SEQ ID NO: 1690 - protein, 19 aa, Artificial Sequence
  Non-cyclic GFR-binding peptide
  MOD_RES (5), (6): Xaa is C or S
VPKPXXAPTQLSPISVLYK

SEQ ID NO: 1691 - protein, 20 aa, Artificial Sequence
  Non-cyclic GFR-binding peptide
  MOD_RES (6), (7): Xaa is C or S
KVGKAXXVPTKLSAISVLYL

SEQ ID NO: 1692 - protein, 20 aa, Artificial Sequence
  Non-cyclic GFR-binding peptide
  MOD_RES (6), (7): Xaa is C or S
ASASPXXVSQDLSAISILYL

SEQ ID NO: 1693 - protein, 18 aa, Artificial Sequence
  Non-cyclic GFR-binding peptide
  MOD_RES (4), (5): Xaa is C or S
AAPXXVPQALNAISILYF

SEQ ID NO: 1694 - protein, 16 aa, Artificial Sequence
  Non-cyclic GFR-binding peptide
  MOD_RES (2), (3): Xaa is C or S
AXXAPTKLSPISVLYK

SEQ ID NO: 1695 - protein, 16 aa, Artificial Sequence
  Non-cyclic GFR-binding peptide
  MOD_RES (3), (3): Xaa is C or S
PTXAPTKLSPISVLYK

SEQ ID NO: 1696 - protein, 15 aa, Artificial Sequence
  Non-cyclic GFR-binding peptide
  MOD_RES (1), (2): Xaa is C or S
XXVSQDLNAISILYF

SEQ ID NO: 1697 - protein, 19 aa, Artificial Sequence
  Non-cyclic GFR-binding peptide
  MOD_RES (5), (6): Xaa is C or S
VPKPXXAPTKLSPISVLYK

SEQ ID NO: 1698 - protein, 15 aa, Artificial Sequence
  Non-cyclic GFR-binding peptide
  MOD_RES (1), (2): Xaa is C or S
XXVPQDLSATSILYY

SEQ ID NO: 1699 - protein, 16 aa, Artificial Sequence
  Non-cyclic GFR-binding peptide
  MOD_RES (2), (3): Xaa is C or S
PXXAPTKLSAISVLYL

SEQ ID NO: 1700 - protein, 13 aa, Artificial Sequence
  Non-cyclic GFR-binding peptide
VPTKLSAISVLYL

SEQ ID NO: 1701 - protein, 13 aa, Artificial Sequence
  Non-cyclic GFR-binding peptide
VPQDLSATSILYY

SEQ ID NO: 1702 - protein, 12 aa, Artificial Sequence
  Non-cyclic GFR-binding peptide
QVQLSPISVLYK

SEQ ID NO: 1703 - protein, 20 aa, Artificial Sequence
  Non-cyclic GFR-binding peptide
  MOD_RES (6), (7): Xaa is C or S
KVGKAXXVPTKLSATSVLYY

SEQ ID NO: 1704 - protein, 11 aa, Artificial Sequence
  Non-cyclic GFR-binding peptide
QALNAISILYF

SEQ ID NO: 1705 - protein, 20 aa, Artificial Sequence
  Non-cyclic GFR-binding peptide
  MOD_RES (6), (7): Xaa is C or S
ASASPXXVSQDLNAISILYF

SEQ ID NO: 1706 - protein, 14 aa, Artificial Sequence
  Non-cyclic GFR-binding peptide
PTQVQLSAISVLYL

SEQ ID NO: 1707 - protein, 10 aa, Artificial Sequence
  Non-cyclic GFR-binding peptide
QLSPISVLYK

SEQ ID NO: 1708 - protein, 11 aa, Artificial Sequence
  Non-cyclic GFR-binding peptide
TQLSAISVLYL

SEQ ID NO: 1709 - protein, 14 aa, Artificial Sequence
  Non-cyclic GFR-binding peptide
  MOD_RES (1), (1): Xaa is C or S
XAPTQLSAISVLYL

SEQ ID NO: 1710 - protein, 13 aa, Artificial Sequence
  Non-cyclic GFR-binding peptide
VSQDLNAISILYF

SEQ ID NO: 1711 - protein, 11 aa, Artificial Sequence
  Non-cyclic GFR-binding peptide
QDLSAISILYL

SEQ ID NO: 1712 - protein, 16 aa, Artificial Sequence
  Non-cyclic GFR-binding peptide
  MOD_RES (2), (3): Xaa is C or S
PXXVPQDLSPISILYK

SEQ ID NO: 1713 - protein, 15 aa, Artificial Sequence
  Non-cyclic GFR-binding peptide
  MOD_RES (1), (2): Xaa is C or S
XXVSQDLSPISILYK

SEQ ID NO: 1714 - protein, 18 aa, Artificial Sequence
  Non-cyclic GFR-binding peptide
  MOD_RES (4), (5): Xaa is C or S
ASPXXVPQDLNAISILYF

SEQ ID NO: 1715 - protein, 11 aa, Artificial Sequence
  Non-cyclic GFR-binding peptide
QALSPISILYK

SEQ ID NO: 1716 - protein, 20 aa, Artificial Sequence
  Non-cyclic GFR-binding peptide
  MOD_RES (6), (7): Xaa is C or S
ASASPXXVSQDLSPISILYK

SEQ ID NO: 1717 - protein, 15 aa, Artificial Sequence
  Non-cyclic GFR-binding peptide
  MOD_RES (1), (2): Xaa is C or S
XXVPTELSATSMLYY

SEQ ID NO: 1718 - protein, 17 aa, Artificial Sequence
  Non-cyclic GFR-binding peptide
  MOD_RES (4), (4): Xaa is C or S
KPTXAPTKLSPISVLYK

SEQ ID NO: 1719 - protein, 14 aa, Artificial Sequence
  Non-cyclic GFR-binding peptide
  MOD_RES (1), (1): Xaa is C or S
XVSQDLSATSILYY

SEQ ID NO: 1720 - protein, 16 aa, Artificial Sequence
  Non-cyclic GFR-binding peptide
  MOD_RES (2), (3): Xaa is C or S
PXXVPQDLNAISILYF

SEQ ID NO: 1721 - protein, 13 aa, Artificial Sequence
  Non-cyclic GFR-binding peptide
VSQDLSPISILYK

SEQ ID NO: 1722 - protein, 13 aa, Artificial Sequence
  Non-cyclic GFR-binding peptide
VPTELSATSMLYY

SEQ ID NO: 1723 - protein, 14 aa, Artificial Sequence
  Non-cyclic GFR-binding peptide
  MOD_RES (1), (1): Xaa is C or S
XAPTQLSATSVLYY

SEQ ID NO: 1724 - protein, 9 aa, Artificial Sequence
  Non-cyclic GFR-binding peptide
LSPISILYK

SEQ ID NO: 1725 - protein, 16 aa, Artificial Sequence
  Non-cyclic GFR-binding peptide
  MOD_RES (1), (1): Xaa is C or S
XRPTQVQLSATSVLYY

SEQ ID NO: 1726 - protein, 15 aa, Artificial Sequence
  Non-cyclic GFR-binding peptide
  MOD_RES (1), (2): Xaa is C or S
XXVPQALSPISILYK

SEQ ID NO: 1727 - protein, 16 aa, Artificial Sequence
  Non-cyclic GFR-binding peptide
  MOD_RES (2), (3): Xaa is C or S
PXXAPTQLSPISVLYK

SEQ ID NO: 1728 - protein, 12 aa, Artificial Sequence
  Non-cyclic GFR-binding peptide
QVQLNAISVLYF

SEQ ID NO: 1729 - protein, 16 aa, Artificial Sequence
  Non-cyclic GFR-binding peptide
  MOD_RES (2), (3): Xaa is C or S
AXXVPTELSATSMLYY

SEQ ID NO: 1730 - protein, 19 aa, Artificial Sequence
  Non-cyclic GFR-binding peptide
  MOD_RES (5), (6): Xaa is C or S
SASPXXVSQDLNAISILYF

SEQ ID NO: 1731 - protein, 17 aa, Artificial Sequence
  Non-cyclic GFR-binding peptide
  MOD_RES (4), (4): Xaa is C or S
KPTXAPTKLSATSVLYY

SEQ ID NO: 1732 - protein, 18 aa, Artificial Sequence
  Non-cyclic GFR-binding peptide
  MOD_RES (4), (5): Xaa is C or S
AAPXXVPQALSPISILYK

SEQ ID NO: 1733 - protein, 20 aa, Artificial Sequence
  Non-cyclic GFR-binding peptide
  MOD_RES (7), (7): Xaa is C or S
HVTKPTXAPTKLSATSVLYY

SEQ ID NO: 1734 - protein, 14 aa, Artificial Sequence
  Non-cyclic GFR-binding peptide
PTQVQLSPISVLYK

SEQ ID NO: 1735 - protein, 13 aa, Artificial Sequence
  Non-cyclic GFR-binding peptide
VPTKLSATSVLYY

SEQ ID NO: 1736 - protein, 20 aa, Artificial Sequence
  Non-cyclic GFR-binding peptide
  MOD_RES (6), (7): Xaa is C or S
YVPKPXXAPTKLSAISVLYL

SEQ ID NO: 1737 - protein, 16 aa, Artificial Sequence
  Non-cyclic GFR-binding peptide
  MOD_RES (2), (3): Xaa is C or S
PXXVPQALNAISILYF

SEQ ID NO: 1738 - protein, 10 aa, Artificial Sequence
  Non-cyclic GFR-binding peptide
KLSAISVLYL

SEQ ID NO: 1739 - protein, 14 aa, Artificial Sequence
  Non-cyclic GFR-binding peptide
  MOD_RES (1), (1): Xaa is C or S
XAPTKLSPISVLYK

SEQ ID NO: 1740 - protein, 15 aa, Artificial Sequence
  Non-cyclic GFR-binding peptide
  MOD_RES (1), (2): Xaa is C or S
XXVSQDLSAISILYL

SEQ ID NO: 1741 - protein, 18 aa, Artificial Sequence
  Non-cyclic GFR-binding peptide
  MOD_RES (4), (5): Xaa is C or S
PKPXXAPTQLSPISVLYK

SEQ ID NO: 1742 - protein, 20 aa, Artificial Sequence
  Non-cyclic GFR-binding peptide
  MOD_RES (6), (7): Xaa is C or S
KVGKAXXVPTKLNAISVLYF

SEQ ID NO: 1743 - protein, 13 aa, Artificial Sequence
  Non-cyclic GFR-binding peptide
APTQLSPISVLYK

SEQ ID NO: 1744 - protein, 18 aa, Artificial Sequence
  Non-cyclic GFR-binding peptide
  MOD_RES (4), (5): Xaa is C or S
ASPXXVSQDLSATSILYY

SEQ ID NO: 1745 - protein, 10 aa, Artificial Sequence
  Non-cyclic GFR-binding peptide
ALSPISILYK

SEQ ID NO: 1746 - protein, 18 aa, Artificial Sequence
  Non-cyclic GFR-binding peptide
  MOD_RES (4), (5): Xaa is C or S
PKAXXVPTELSATSMLYY

SEQ ID NO: 1747 - protein, 17 aa, Artificial Sequence
  Non-cyclic GFR-binding peptide
  MOD_RES (3), (4): Xaa is C or S
KAXXAPTKLSPISVLYK

SEQ ID NO: 1748 - protein, 12 aa, Artificial Sequence
  Non-cyclic GFR-binding peptide
PQALSATSILYY

SEQ ID NO: 1749 - protein, 14 aa, Artificial Sequence
  Non-cyclic GFR-binding peptide
  MOD_RES (1), (1): Xaa is C or S
XVPQALSATSILYY

SEQ ID NO: 1750 - protein, 12 aa, Artificial Sequence
  Non-cyclic GFR-binding peptide
PQDLSPISILYK

SEQ ID NO: 1751 - protein, 13 aa, Artificial Sequence
  Non-cyclic GFR-binding peptide
VPQALSPISILYK

SEQ ID NO: 1752 - protein, 13 aa, Artificial Sequence
  Non-cyclic GFR-binding peptide
TQVQLSATSVLYY

SEQ ID NO: 1753 - protein, 20 aa, Artificial Sequence
  Non-cyclic GFR-binding peptide
  MOD_RES (6), (7): Xaa is C or S
ASAAPXXVPQALSATSILYY

SEQ ID NO: 1754 - protein, 15 aa, Artificial Sequence
  Non-cyclic GFR-binding peptide
  MOD_RES (1), (2): Xaa is C or S
XXAPTQLSPISVLYK

SEQ ID NO: 1755 - protein, 11 aa, Artificial Sequence
  Non-cyclic GFR-binding peptide
TELSATSMLYY

SEQ ID NO: 1756 - protein, 19 aa, Artificial Sequence
  Non-cyclic GFR-binding peptide
  MOD_RES (5), (6): Xaa is C or S
SAAPXXVPQALSAISILYL

SEQ ID NO: 1757 - protein, 15 aa, Artificial Sequence
  Non-cyclic GFR-binding peptide
  MOD_RES (1), (2): Xaa is C or S
XXVPTELNAISMLYF

SEQ ID NO: 1758 - protein, 18 aa, Artificial Sequence
  Non-cyclic GFR-binding peptide
  MOD_RES (4), (5): Xaa is C or S
PKPXXAPTKLSATSVLYY

SEQ ID NO: 1759 - protein, 14 aa, Artificial Sequence
  Non-cyclic GFR-binding peptide
  MOD_RES (1), (1): Xaa is C or S
XVPQDLSPISILYK

SEQ ID NO: 1760 - protein, 20 aa, Artificial Sequence
  Non-cyclic GFR-binding peptide
  MOD_RES (6), (7): Xaa is C or S
ASASPXXVPQDLSAISILYL

SEQ ID NO: 1761 - protein, 19 aa, Artificial Sequence
  Non-cyclic GFR-binding peptide
  MOD_RES (6), (6): Xaa is C or S
VTKPTXAPTKLSPISVLYK

SEQ ID NO: 1762 - protein, 15 aa, Artificial Sequence
  Non-cyclic GFR-binding peptide
  MOD_RES (2), (2): Xaa is C or S
TXAPTKLSAISVLYL

SEQ ID NO: 1763 - protein, 18 aa, Artificial Sequence
  Non-cyclic GFR-binding peptide
  MOD_RES (4), (5): Xaa is C or S
PKAXXAPTKLSPISVLYK

SEQ ID NO: 1764 - protein, 12 aa, Artificial Sequence
  Non-cyclic GFR-binding peptide
PTKLSAISVLYL

SEQ ID NO: 1765 - protein, 15 aa, Artificial Sequence
  Non-cyclic GFR-binding peptide
  MOD_RES (1), (2): Xaa is C or S
XXVPQDLSPISILYK

SEQ ID NO: 1766 - protein, 15 aa, Artificial Sequence
  Non-cyclic GFR-binding peptide
RPTQVQLSPISVLYK

SEQ ID NO: 1767 - protein, 17 aa, Artificial Sequence
  Non-cyclic GFR-binding peptide
  MOD_RES (2), (2): Xaa is C or S
QXRPTQVQLNAISVLYF

SEQ ID NO: 1768 - protein, 13 aa, Artificial Sequence
  Non-cyclic GFR-binding peptide
VPTELNAISMLYF

SEQ ID NO: 1769 - protein, 19 aa, Artificial Sequence
  Non-cyclic GFR-binding peptide
  MOD_RES (5), (6): Xaa is C or S
VPKPXXAPTKLSATSVLYY

SEQ ID NO: 1770 - protein, 20 aa, Artificial Sequence
  Non-cyclic GFR-binding peptide
  MOD_RES (6), (7): Xaa is C or S
ASAAPXXVPQALSPISILYK

SEQ ID NO: 1771 - protein, 18 aa, Artificial Sequence
  Non-cyclic GFR-binding peptide
  MOD_RES (4), (5): Xaa is C or S
PKPXXAPTQLSATSVLYY

SEQ ID NO: 1772 - protein, 20 aa, Artificial Sequence
  Non-cyclic GFR-binding peptide
  MOD_RES (6), (7): Xaa is C or S
KIPKAXXVPTELSPISMLYK

SEQ ID NO: 1773 - protein, 17 aa, Artificial Sequence
  Non-cyclic GFR-binding peptide
  MOD_RES (3), (4): Xaa is C or S
KPXXAPTQLSATSVLYY

SEQ ID NO: 1774 - protein, 20 aa, Artificial Sequence
  Non-cyclic GFR-binding peptide
  MOD_RES (6), (7): Xaa is C or S
ASASPXXVSQDLSATSILYY

SEQ ID NO: 1775 - protein, 16 aa, Artificial Sequence
  Non-cyclic GFR-binding peptide
  MOD_RES (2), (3): Xaa is C or S
AXXVPTKLSATSVLYY

SEQ ID NO: 1776 - protein, 12 aa, Artificial Sequence
  Non-cyclic GFR-binding peptide
SQDLSPISILYK

SEQ ID NO: 1777 - protein, 20 aa, Artificial Sequence
  Non-cyclic GFR-binding peptide
  MOD_RES (6), (7): Xaa is C or S
KIPKAXXVPTELSATSMLYY

SEQ ID NO: 1778 - protein, 17 aa, Artificial Sequence
  Non-cyclic GFR-binding peptide
  MOD_RES (3), (4): Xaa is C or S
KPXXAPTKLSPISVLYK

SEQ ID NO: 1779 - protein, 17 aa, Artificial Sequence
  Non-cyclic GFR-binding peptide
  MOD_RES (3), (4): Xaa is C or S
KPXXAPTQLSPISVLYK

SEQ ID NO: 1780 - protein, 12 aa, Artificial Sequence
  Non-cyclic GFR-binding peptide
PQDLSATSILYY

SEQ ID NO: 1781 - protein, 16 aa, Artificial Sequence
  Non-cyclic GFR-binding peptide
  MOD_RES (2), (3): Xaa is C or S
PXXVSQDLNAISILYF

SEQ ID NO: 1782 - protein, 14 aa, Artificial Sequence
  Non-cyclic GFR-binding peptide
  MOD_RES (1), (1): Xaa is C or S
XVPQDLSATSILYY

SEQ ID NO: 1783 - protein, 18 aa, Artificial Sequence
  Non-cyclic GFR-binding peptide
  MOD_RES (3), (3): Xaa is C or S
VQXRPTQVQLSPISVLYK

SEQ ID NO: 1784 - protein, 14 aa, Artificial Sequence
  Non-cyclic GFR-binding peptide
  MOD_RES (1), (1): Xaa is C or S
XVPQALSPISILYK

SEQ ID NO: 1785 - protein, 14 aa, Artificial Sequence
  Non-cyclic GFR-binding peptide
  MOD_RES (1), (1): Xaa is C or S
XVPTELNAISMLYF

SEQ ID NO: 1786 - protein, 17 aa, Artificial Sequence
  Non-cyclic GFR-binding peptide
  MOD_RES (3), (4): Xaa is C or S
SPXXVSQDLSAISILYL

SEQ ID NO: 1787 - protein, 13 aa, Artificial Sequence
  Non-cyclic GFR-binding peptide
TQVQLSPISVLYK

SEQ ID NO: 1788 - protein, 20 aa, Artificial Sequence
  Non-cyclic GFR-binding peptide
  MOD_RES (5), (5): Xaa is C or S
RNVQXRPTQVQLSPISVLYK

SEQ ID NO: 1789 - protein, 20 aa, Artificial Sequence
  Non-cyclic GFR-binding peptide
  MOD_RES (6), (7): Xaa is C or S
ASASPXXVPQDLNAISILYF

SEQ ID NO: 1790 - protein, 12 aa, Artificial Sequence
  Non-cyclic GFR-binding peptide
PTQLSAISVLYL

SEQ ID NO: 1791 - protein, 18 aa, Artificial Sequence
  Non-cyclic GFR-binding peptide
  MOD_RES (5), (5): Xaa is C or S
TKPTXAPTKLSPISVLYK

SEQ ID NO: 1792 - protein, 18 aa, Artificial Sequence
  Non-cyclic GFR-binding peptide
  MOD_RES (4), (5): Xaa is C or S
PKPXXAPTKLSPISVLYK

SEQ ID NO: 1793 - protein, 14 aa, Artificial Sequence
  Non-cyclic GFR-binding peptide
  MOD_RES (1), (1): Xaa is C or S
XVPTKLNAISVLYF

SEQ ID NO: 1794 - protein, 10 aa, Artificial Sequence
  Non-cyclic GFR-binding peptide
DLSPISILYK

SEQ ID NO: 1795 - protein, 15 aa, Artificial Sequence
  Non-cyclic GFR-binding peptide
  MOD_RES (1), (2): Xaa is C or S
XXAPTQLSATSVLYY

SEQ ID NO: 1796 - protein, 14 aa, Artificial Sequence
  Non-cyclic GFR-binding peptide
  MOD_RES (1), (1): Xaa is C or S
XVPTKLSAISVLYL

SEQ ID NO: 1797 - protein, 20 aa, Artificial Sequence
  Non-cyclic GFR-binding peptide
  MOD_RES (7), (7): Xaa is C or S
HVTKPTXAPTKLSPISVLYK

SEQ ID NO: 1798 - protein, 13 aa, Artificial Sequence
  Non-cyclic GFR-binding peptide
APTKLSPISVLYK

SEQ ID NO: 1799 - protein, 19 aa, Artificial Sequence
  Non-cyclic GFR-binding peptide
  MOD_RES (6), (6): Xaa is C or S
VTKPTXAPTKLSATSVLYY

SEQ ID NO: 1800 - protein, 16 aa, Artificial Sequence
  Non-cyclic GFR-binding peptide
  MOD_RES (2), (3): Xaa is C or S
PXXVSQDLSAISILYL

SEQ ID NO: 1801 - protein, 13 aa, Artificial Sequence
  Non-cyclic GFR-binding peptide
APTQLSATSVLYY

SEQ ID NO: 1802 - protein, 19 aa, Artificial Sequence
  Non-cyclic GFR-binding peptide
  MOD_RES (4), (4): Xaa is C or S
NVQXRPTQVQLSPISVLYK

SEQ ID NO: 1803 - protein, 17 aa, Artificial Sequence
  Non-cyclic GFR-binding peptide
  MOD_RES (3), (4): Xaa is C or S
SPXXVSQDLNAISILYF

SEQ ID NO: 1804 - protein, 11 aa, Artificial Sequence
  Non-cyclic GFR-binding peptide
VQLSATSVLYY

SEQ ID NO: 1805 - protein, 13 aa, Artificial Sequence
  Non-cyclic GFR-binding peptide
IFLVSIPSLKTPA

SEQ ID NO: 1806 - protein, 14 aa, Artificial Sequence
  Non-cyclic GFR-binding peptide
  MOD_RES (14), (14): Xaa is C or S
IFLISIPSLAQPVX

SEQ ID NO: 1807 - protein, 20 aa, Artificial Sequence
  Non-cyclic GFR-binding peptide
  MOD_RES (14), (14): Xaa is C or S
IFLVSIPSLKTPAXTPKTVH

SEQ ID NO: 1808 - protein, 11 aa, Artificial Sequence
  Non-cyclic GFR-binding peptide
YYLVTLPELQT

SEQ ID NO: 1809 - protein, 13 aa, Artificial Sequence
  Non-cyclic GFR-binding peptide
YYVIPLPELDQPV

SEQ ID NO: 1810 - protein, 19 aa, Artificial Sequence
  Non-cyclic GFR-binding peptide
  MOD_RES (14), (15): Xaa is C or S
YYLVTLPELKTPAXXPKPV

SEQ ID NO: 1811 - protein, 17 aa, Artificial Sequence
  Non-cyclic GFR-binding peptide
  MOD_RES (14), (15): Xaa is C or S
YYLVTLPELQTPAXXPK

SEQ ID NO: 1812 - protein, 18 aa, Artificial Sequence
  Non-cyclic GFR-binding peptide
  MOD_RES (14), (14): Xaa is C or S
YYLVTLPELKTPAXTPKT

SEQ ID NO: 1813 - protein, 16 aa, Artificial Sequence
  Non-cyclic GFR-binding peptide
  MOD_RES (14), (15): Xaa is C or S
YYVVPLPELKTPAXXP

SEQ ID NO: 1814 - protein, 16 aa, Artificial Sequence
  Non-cyclic GFR-binding peptide
  MOD_RES (14), (14): Xaa is C or S
YYLVTLPELKTPAXTP

SEQ ID NO: 1815 - protein, 13 aa, Artificial Sequence
  Non-cyclic GFR-binding peptide
LYLISIASLRTPV

SEQ ID NO: 1816 - protein, 19 aa, Artificial Sequence
  Non-cyclic GFR-binding peptide
  MOD_RES (14), (15): Xaa is C or S
IFLISIPSLDQPVXXPSAS

SEQ ID NO: 1817 - protein, 9 aa, Artificial Sequence
  Non-cyclic GFR-binding peptide
YYVVPLPEL

SEQ ID NO: 1818 - protein, 20 aa, Artificial Sequence
  Non-cyclic GFR-binding peptide
  MOD_RES (14), (15): Xaa is C or S
IFLVSIPSLKTPAXXPKPVY

SEQ ID NO: 1819 - protein, 16 aa, Artificial Sequence
  Non-cyclic GFR-binding peptide
  MOD_RES (14), (15): Xaa is C or S
IFLMSIPSLETPVXXA

SEQ ID NO: 1820 - protein, 20 aa, Artificial Sequence
  Non-cyclic GFR-binding peptide
  MOD_RES (14), (15): Xaa is C or S
IFLMSIPSLETPVXXAKPIS

SEQ ID NO: 1821 - protein, 10 aa, Artificial Sequence
  Non-cyclic GFR-binding peptide
YYVIPLPELD

SEQ ID NO: 1822 - protein, 13 aa, Artificial Sequence
  Non-cyclic GFR-binding peptide
YYLMTLPELETPV

SEQ ID NO: 1823 - protein, 11 aa, Artificial Sequence
  Non-cyclic GFR-binding peptide
YYVIPLPELRT

SEQ ID NO: 1824 - protein, 19 aa, Artificial Sequence
  Non-cyclic GFR-binding peptide
  MOD_RES (14), (15): Xaa is C or S
YYVVPLPELKTPAXXPKPV

SEQ ID NO: 1825 - protein, 15 aa, Artificial Sequence
  Non-cyclic GFR-binding peptide
  MOD_RES (14), (15): Xaa is C or S
YYLMTLPELETPVXX

SEQ ID NO: 1826 - protein, 9 aa, Artificial Sequence
  Non-cyclic GFR-binding peptide
IFLMSIPSL

SEQ ID NO: 1827 - protein, 15 aa, Artificial Sequence
  Non-cyclic GFR-binding peptide
  MOD_RES (14), (15): Xaa is C or S
IFLISIPSLDQSVXX

SEQ ID NO: 1828 - protein, 16 aa, Artificial Sequence
  Non-cyclic GFR-binding peptide
  MOD_RES (14), (15): Xaa is C or S
YYVIPLPELDQPVXXP

SEQ ID NO: 1829 - protein, 11 aa, Artificial Sequence
  Non-cyclic GFR-binding peptide
YYVVPLPELQT

SEQ ID NO: 1830 - protein, 17 aa, Artificial Sequence
  Non-cyclic GFR-binding peptide
  MOD_RES (14), (14): Xaa is C or S
IFLVSIPSLKTPAXTPK

SEQ ID NO: 1831 - protein, 20 aa, Artificial Sequence
  Non-cyclic GFR-binding peptide
  MOD_RES (14), (15): Xaa is C or S
YYVIPLPELDQSVXXPSASA

SEQ ID NO: 1832 - protein, 20 aa, Artificial Sequence
  Non-cyclic GFR-binding peptide
  MOD_RES (14), (15): Xaa is C or S
LYLISIASLRTPVXXTPPTS

SEQ ID NO: 1833 - protein, 17 aa, Artificial Sequence
  Non-cyclic GFR-binding peptide
  MOD_RES (14), (15): Xaa is C or S
YYVVPLPELQTPAXXPK

SEQ ID NO: 1834 - protein, 14 aa, Artificial Sequence
  Non-cyclic GFR-binding peptide
  MOD_RES (14), (14): Xaa is C or S
YYVVPLPELQTPAX

SEQ ID NO: 1835 - protein, 17 aa, Artificial Sequence
  Non-cyclic GFR-binding peptide
  MOD_RES (14), (14): Xaa is C or S
YYVVPLPELKTPAXTPK

SEQ ID NO: 1836 - protein, 19 aa, Artificial Sequence
  Non-cyclic GFR-binding peptide
  MOD_RES (14), (15): Xaa is C or S
IFLMSIPSLETPVXXAKPI

SEQ ID NO: 1837 - protein, 10 aa, Artificial Sequence
  Non-cyclic GFR-binding peptide
YYLITLPELR

SEQ ID NO: 1838 - protein, 16 aa, Artificial Sequence
  Non-cyclic GFR-binding peptide
  MOD_RES (14), (14): Xaa is C or S
YYVVPLPELKTPAXTP

SEQ ID NO: 1839 - protein, 19 aa, Artificial Sequence
  Non-cyclic GFR-binding peptide
  MOD_RES (14), (15): Xaa is C or S
LYLISIASLRTPVXXTPPT

SEQ ID NO: 1840 - protein, 16 aa, Artificial Sequence
  Non-cyclic GFR-binding peptide
  MOD_RES (14), (15): Xaa is C or S
YYLVTLPELKTPAXXP

SEQ ID NO: 1841 - protein, 17 aa, Artificial Sequence
  Non-cyclic GFR-binding peptide
  MOD_RES (14), (15): Xaa is C or S
YYVIPLPELDQSVXXPS

SEQ ID NO: 1842 - protein, 19 aa, Artificial Sequence
  Non-cyclic GFR-binding peptide
  MOD_RES (14), (15): Xaa is C or S
IFLISIPSLAQPVXXPAAS

SEQ ID NO: 1843 - protein, 14 aa, Artificial Sequence
  Non-cyclic GFR-binding peptide
  MOD_RES (14), (14): Xaa is C or S
YYVIPLPELRTPVX

SEQ ID NO: 1844 - protein, 20 aa, Artificial Sequence
  Non-cyclic GFR-binding peptide
  MOD_RES (14), (15): Xaa is C or S
YYLMTLPELETPVXXAKPIK

SEQ ID NO: 1845 - protein, 15 aa, Artificial Sequence
  Non-cyclic GFR-binding peptide
  MOD_RES (14), (15): Xaa is C or S
YYVVPLPELKTPAXX

SEQ ID NO: 1846 - protein, 15 aa, Artificial Sequence
  Non-cyclic GFR-binding peptide
  MOD_RES (14), (14): Xaa is C or S
IFLVSIPSLKTPAXT

SEQ ID NO: 1847 - protein, 13 aa, Artificial Sequence
  Non-cyclic GFR-binding peptide
IFLISIPSLDQPV

SEQ ID NO: 1848 - protein, 13 aa, Artificial Sequence
  Non-cyclic GFR-binding peptide
YYVVPLPELKTPA

SEQ ID NO: 1849 - protein, 13 aa, Artificial Sequence
  Non-cyclic GFR-binding peptide
IFLMSIPSLETPV

SEQ ID NO: 1850 - protein, 10 aa, Artificial Sequence
  Non-cyclic GFR-binding peptide
YYVIPLPELR

SEQ ID NO: 1851 - protein, 20 aa, Artificial Sequence
  Non-cyclic GFR-binding peptide
  MOD_RES (14), (15): Xaa is C or S
YYVMPLPELETPVXXAKPIS

SEQ ID NO: 1852 - protein, 16 aa, Artificial Sequence
  Non-cyclic GFR-binding peptide
  MOD_RES (14), (15): Xaa is C or S
YYLITLPELRTPVXXT

SEQ ID NO: 1853 - protein, 12 aa, Artificial Sequence
  Non-cyclic GFR-binding peptide
LYLISIASLRTP

SEQ ID NO: 1854 - protein, 14 aa, Artificial Sequence
  Non-cyclic GFR-binding peptide
  MOD_RES (14), (14): Xaa is C or S
YYLITLPELRTPVX

SEQ ID NO: 1855 - protein, 14 aa, Artificial Sequence
  Non-cyclic GFR-binding peptide
  MOD_RES (14), (14): Xaa is C or S
YYLVTLPELKTPAX

SEQ ID NO: 1856 - protein, 16 aa, Artificial Sequence
  Non-cyclic GFR-binding peptide
  MOD_RES (14), (14): Xaa is C or S
IFLVSIPSLKTPAXTP

SEQ ID NO: 1857 - protein, 17 aa, Artificial Sequence
  Non-cyclic GFR-binding peptide
  MOD_RES (14), (14): Xaa is C or S
YYLVTLPELKTPAXTPK

SEQ ID NO: 1858 - protein, 14 aa, Artificial Sequence
  Non-cyclic GFR-binding peptide
  MOD_RES (14), (14): Xaa is C or S
IFLISIPSLDQSVX

SEQ ID NO: 1859 - protein, 19 aa, Artificial Sequence
  Non-cyclic GFR-binding peptide
  MOD_RES (14), (14): Xaa is C or S
YYLVTLPELKTPAXTPKTV

SEQ ID NO: 1860 - protein, 9 aa, Artificial Sequence
  Non-cyclic GFR-binding peptide
IFLVSIPSL

SEQ ID NO: 1861 - protein, 15 aa, Artificial Sequence
  Non-cyclic GFR-binding peptide
  MOD_RES (14), (14): Xaa is C or S
YYVVPLPELKTPAXT

SEQ ID NO: 1862 - protein, 16 aa, Artificial Sequence
  Non-cyclic GFR-binding peptide
  MOD_RES (14), (15): Xaa is C or S
YYLMTLPELETPVXXA

SEQ ID NO: 1863 - protein, 11 aa, Artificial Sequence
  Non-cyclic GFR-binding peptide
IFLISIPSLAQ

SEQ ID NO: 1864 - protein, 20 aa, Artificial Sequence
  Non-cyclic GFR-binding peptide
  MOD_RES (14), (15): Xaa is C or S
IFLISIPSLDQSVXXPSASA

SEQ ID NO: 1865 - protein, 15 aa, Artificial Sequence
  Non-cyclic GFR-binding peptide
  MOD_RES (14), (15): Xaa is C or S
YYVIPLPELDQPVXX

SEQ ID NO: 1866 - protein, 14 aa, Artificial Sequence
  Non-cyclic GFR-binding peptide
  MOD_RES (14), (14): Xaa is C or S
YYLVTLPELQTPAX

SEQ ID NO: 1867 - protein, 13 aa, Artificial Sequence
  Non-cyclic GFR-binding peptide
IFLISIPSLDQSV

SEQ ID NO: 1868 - protein, 18 aa, Artificial Sequence
  Non-cyclic GFR-binding peptide
  MOD_RES (14), (15): Xaa is C or S
IFLISIPSLDQPVXXPSA

SEQ ID NO: 1869 - protein, 20 aa, Artificial Sequence
  Non-cyclic GFR-binding peptide
  MOD_RES (14), (14): Xaa is C or S
YYVVPLPELKTPAXTPKTVH

SEQ ID NO: 1870 - protein, 19 aa, Artificial Sequence
  Non-cyclic GFR-binding peptide
  MOD_RES (14), (15): Xaa is C or S
YYLMTLPELETPVXXAKPI

SEQ ID NO: 1871 - protein, 15 aa, Artificial Sequence
  Non-cyclic GFR-binding peptide
  MOD_RES (14), (15): Xaa is C or S
IFLISIPSLAQPVXX

SEQ ID NO: 1872 - protein, 16 aa, Artificial Sequence
  Non-cyclic GFR-binding peptide
  MOD_RES (14), (15): Xaa is C or S
IFLISIPSLDQPVXXP

SEQ ID NO: 1873 - protein, 17 aa, Artificial Sequence
  Non-cyclic GFR-binding peptide
  MOD_RES (14), (15): Xaa is C or S
YYLMTLPELETPVXXAK

SEQ ID NO: 1874 - protein, 16 aa, Artificial Sequence
  Non-cyclic GFR-binding peptide
  MOD_RES (14), (15): Xaa is C or S
IFLVSIPSLKTPAXXP

SEQ ID NO: 1875 - protein, 17 aa, Artificial Sequence
  Non-cyclic GFR-binding peptide
  MOD_RES (14), (15): Xaa is C or S
YYLITLPELAQPVXXPA

SEQ ID NO: 1876 - protein, 10 aa, Artificial Sequence
  Non-cyclic GFR-binding peptide
YYLVTLPELQ

SEQ ID NO: 1877 - protein, 19 aa, Artificial Sequence
  Non-cyclic GFR-binding peptide
  MOD_RES (14), (15): Xaa is C or S
YYVIPLPELDQPVXXPSAS

SEQ ID NO: 1878 - protein, 11 aa, Artificial Sequence
  Non-cyclic GFR-binding peptide
YYLITLPELAQ

SEQ ID NO: 1879 - protein, 14 aa, Artificial Sequence
  Non-cyclic GFR-binding peptide
  MOD_RES (14), (14): Xaa is C or S
IFLVSIPSLQTPAX

SEQ ID NO: 1880 - protein, 19 aa, Artificial Sequence
  Non-cyclic GFR-binding peptide
  MOD_RES (14), (15): Xaa is C or S
IFLVSIPSLQTPAXXPKPV

SEQ ID NO: 1881 - protein, 12 aa, Artificial Sequence
  Non-cyclic GFR-binding peptide
FYLISIANLRTP

SEQ ID NO: 1882 - protein, 20 aa, Artificial Sequence
  Non-cyclic GFR-binding peptide
  MOD_RES (14), (15): Xaa is C or S
IFLVSIPSLQTPAXXPKPVT

SEQ ID NO: 1883 - protein, 9 aa, Artificial Sequence
  Non-cyclic GFR-binding peptide
YYVMPLPEL

SEQ ID NO: 1884 - protein, 14 aa, Artificial Sequence
  Non-cyclic GFR-binding peptide
  MOD_RES (14), (14): Xaa is C or S
YYVIPLPELDQSVX

SEQ ID NO: 1885 - protein, 13 aa, Artificial Sequence
  Non-cyclic GFR-binding peptide
YYVMPLPELETPV

SEQ ID NO: 1886 - protein, 11 aa, Artificial Sequence
  Non-cyclic GFR-binding peptide
IFLVSIPSLQT

SEQ ID NO: 1887 - protein, 18 aa, Artificial Sequence
  Non-cyclic GFR-binding peptide
  MOD_RES (14), (15): Xaa is C or S
IFLISIPSLAQPVXXPAA

SEQ ID NO: 1888 - protein, 15 aa, Artificial Sequence
  Non-cyclic GFR-binding peptide
  MOD_RES (14), (15): Xaa is C or S
YYVMPLPELETPVXX

SEQ ID NO: 1889 - protein, 9 aa, Artificial Sequence
  Non-cyclic GFR-binding peptide
YYLVTLPEL

SEQ ID NO: 1890 - protein, 13 aa, Artificial Sequence
  Non-cyclic GFR-binding peptide
IFLVSIPSLQTPA

SEQ ID NO: 1891 - protein, 13 aa, Artificial Sequence
  Non-cyclic GFR-binding peptide
YYVIPLPELDQSV

SEQ ID NO: 1892 - protein, 19 aa, Artificial Sequence
  Non-cyclic GFR-binding peptide
  MOD_RES (14), (15): Xaa is C or S
YYLVTLPELQTPAXXPKPV

SEQ ID NO: 1893 - protein, 14 aa, Artificial Sequence
  Non-cyclic GFR-binding peptide
  MOD_RES (14), (14): Xaa is C or S
YYLMTLPELETPVX

SEQ ID NO: 1894 - protein, 10 aa, Artificial Sequence
  Non-cyclic GFR-binding peptide
IFLISIPSLA

SEQ ID NO: 1895 - protein, 15 aa, Artificial Sequence
  Non-cyclic GFR-binding peptide
  MOD_RES (14), (15): Xaa is C or S
YYVIPLPELRTPVXX

SEQ ID NO: 1896 - protein, 20 aa, Artificial Sequence
  Non-cyclic GFR-binding peptide
  MOD_RES (14), (15): Xaa is C or S
YYLVTLPELKTPAXXPKPVY

SEQ ID NO: 1897 - protein, 14 aa, Artificial Sequence
  Non-cyclic GFR-binding peptide
  MOD_RES (14), (14): Xaa is C or S
YYVMPLPELETPVX

SEQ ID NO: 1898 - protein, 17 aa, Artificial Sequence
  Non-cyclic GFR-binding peptide
  MOD_RES (14), (15): Xaa is C or S
YYVIPLPELDQPVXXPS

SEQ ID NO: 1899 - protein, 13 aa, Artificial Sequence
  Non-cyclic GFR-binding peptide
IFLISIPSLAQPV

SEQ ID NO: 1900 - protein, 16 aa, Artificial Sequence
  Non-cyclic GFR-binding peptide
  MOD_RES (14), (15): Xaa is C or S
YYVIPLPELDQSVXXP

SEQ ID NO: 1901 - protein, 20 aa, Artificial Sequence
  Non-cyclic GFR-binding peptide
  MOD_RES (14), (15): Xaa is C or S
YYLMTLPELETPVXXAKPIS

SEQ ID NO: 1902 - protein, 12 aa, Artificial Sequence
  Non-cyclic GFR-binding peptide
IFLISIPSLDQS

SEQ ID NO: 1903 - protein, 16 aa, Artificial Sequence
  Non-cyclic GFR-binding peptide
  MOD_RES (14), (15): Xaa is C or S
FYLISIANLRTPVXXT

SEQ ID NO: 1904 - protein, 9 aa, Artificial Sequence
  Non-cyclic GFR-binding peptide
YYLMTLPEL

SEQ ID NO: 1905 - protein, 10 aa, Artificial Sequence
  Non-cyclic GFR-binding peptide
YYLVTLPELK

SEQ ID NO: 1906 - protein, 15 aa, Artificial Sequence
  Non-cyclic GFR-binding peptide
  MOD_RES (14), (15): Xaa is C or S
YYVIPLPELDQSVXX

SEQ ID NO: 1907 - protein, 12 aa, Artificial Sequence
  Non-cyclic GFR-binding peptide
YYLMTLPELETP

SEQ ID NO: 1908 - protein, 20 aa, Artificial Sequence
  Non-cyclic GFR-binding peptide
  MOD_RES (14), (15): Xaa is C or S
YYLVTLPELQTPAXXPKPVT

SEQ ID NO: 1909 - protein, 14 aa, Artificial Sequence
  Non-cyclic GFR-binding peptide
  MOD_RES (14), (14): Xaa is C or S
IFLVSIPSLKTPAX

SEQ ID NO: 1910 - protein, 10 aa, Artificial Sequence
  Non-cyclic GFR-binding peptide
FYLISIANLR

SEQ ID NO: 1911 - protein, 12 aa, Artificial Sequence
  Non-cyclic GFR-binding peptide
YYVVPLPELKTP

SEQ ID NO: 1912 - protein, 15 aa, Artificial Sequence
  Non-cyclic GFR-binding peptide
  MOD_RES (14), (15): Xaa is C or S
YYLITLPELRTPVXX

SEQ ID NO: 1913 - protein, 16 aa, Artificial Sequence
  Non-cyclic GFR-binding peptide
  MOD_RES (14), (15): Xaa is C or S
IFLVSIPSLQTPAXXP

SEQ ID NO: 1914 - protein, 10 aa, Artificial Sequence
  Non-cyclic GFR-binding peptide
IFLISIPSLD

SEQ ID NO: 1915 - protein, 15 aa, Artificial Sequence
  Non-cyclic GFR-binding peptide
  MOD_RES (14), (15): Xaa is C or S
IFLISIPSLDQPVXX

SEQ ID NO: 1916 - protein, 19 aa, Artificial Sequence
  Non-cyclic GFR-binding peptide
  MOD_RES (14), (15): Xaa is C or S
IFLVSIPSLKTPAXXPKPV

SEQ ID NO: 1917 - protein, 19 aa, Artificial Sequence
  Non-cyclic GFR-binding peptide
  MOD_RES (14), (15): Xaa is C or S
YYLITLPELAQPVXXPAAS

SEQ ID NO: 1918 - protein, 14 aa, Artificial Sequence
  Non-cyclic GFR-binding peptide
  MOD_RES (14), (14): Xaa is C or S
IFLISIPSLDQPVX

SEQ ID NO: 1919 - protein, 10 aa, Artificial Sequence
  Non-cyclic GFR-binding peptide
YYVVPLPELK

SEQ ID NO: 1920 - protein, 19 aa, Artificial Sequence
  Non-cyclic GFR-binding peptide
  MOD_RES (14), (15): Xaa is C or S
YYVIPLPELRTPVXXTPPT

SEQ ID NO: 1921 - protein, 17 aa, Artificial Sequence
  Non-cyclic GFR-binding peptide
  MOD_RES (14), (15): Xaa is C or S
YYLITLPELRTPVXXTP

SEQ ID NO: 1922 - protein, 10 aa, Artificial Sequence
  Non-cyclic GFR-binding peptide
YYVVPLPELQ

SEQ ID NO: 1923 - protein, 15 aa, Artificial Sequence
  Non-cyclic GFR-binding peptide
  MOD_RES (14), (15): Xaa is C or S
IFLVSIPSLKTPAXX

SEQ ID NO: 1924 - protein, 12 aa, Artificial Sequence
  Non-cyclic GFR-binding peptide
YYVMPLPELETP

SEQ ID NO: 1925 - protein, 18 aa, Artificial Sequence
  Non-cyclic GFR-binding peptide
  MOD_RES (14), (15): Xaa is C or S
YYVIPLPELRTPVXXTPP

SEQ ID NO: 1926 - protein, 18 aa, Artificial Sequence
  Non-cyclic GFR-binding peptide
  MOD_RES (14), (15): Xaa is C or S
IFLVSIPSLKTPAXXPKP

SEQ ID NO: 1927 - protein, 18 aa, Artificial Sequence
  Non-cyclic GFR-binding peptide
  MOD_RES (14), (15): Xaa is C or S
IFLVSIPSLQTPAXXPKP

SEQ ID NO: 1928 - protein, 15 aa, Artificial Sequence
  Non-cyclic GFR-binding peptide
  MOD_RES (14), (15): Xaa is C or S
IFLVSIPSLQTPAXX

SEQ ID NO: 1929 - protein, 19 aa, Artificial Sequence
  Non-cyclic GFR-binding peptide
  MOD_RES (14), (14): Xaa is C or S
IFLVSIPSLKTPAXTPKTV

SEQ ID NO: 1930 - protein, 16 aa, Artificial Sequence
  Non-cyclic GFR-binding peptide
  MOD_RES (14), (15): Xaa is C or S
LYLISIASLRTPVXXT

SEQ ID NO: 1931 - protein, 12 aa, Artificial Sequence
  Non-cyclic GFR-binding peptide
IFLISIPSLAQP

SEQ ID NO: 1932 - protein, 18 aa, Artificial Sequence
  Non-cyclic GFR-binding peptide
  MOD_RES (14), (14): Xaa is C or S
IFLVSIPSLKTPAXTPKT

SEQ ID NO: 1933 - protein, 19 aa, Artificial Sequence
  Non-cyclic GFR-binding peptide
  MOD_RES (14), (15): Xaa is C or S
YYVMPLPELETPVXXAKPI

SEQ ID NO: 1934 - protein, 12 aa, Artificial Sequence
  Non-cyclic GFR-binding peptide
YYLVTLPELKTP

SEQ ID NO: 1935 - protein, 13 aa, Artificial Sequence
  Non-cyclic GFR-binding peptide
YYVIPLPELRTPV

SEQ ID NO: 1936 - protein, 12 aa, Artificial Sequence
  Non-cyclic GFR-binding peptide
IFLISIPSLDQP

SEQ ID NO: 1937 - protein, 20 aa, Artificial Sequence
  Non-cyclic GFR-binding peptide
  MOD_RES (14), (15): Xaa is C or S
IFLMSIPSLETPVXXAKPIK

SEQ ID NO: 1938 - protein, 15 aa, Artificial Sequence
  Non-cyclic GFR-binding peptide
  MOD_RES (14), (14): Xaa is C or S
YYLVTLPELKTPAXT

SEQ ID NO: 1939 - protein, 10 aa, Artificial Sequence
  Non-cyclic GFR-binding peptide
YYVMPLPELE

SEQ ID NO: 1940 - protein, 19 aa, Artificial Sequence
  Non-cyclic GFR-binding peptide
  MOD_RES (14), (15): Xaa is C or S
YYVIPLPELDQSVXXPSAS

SEQ ID NO: 1941 - protein, 11 aa, Artificial Sequence
  Non-cyclic GFR-binding peptide
YYLITLPELRT

SEQ ID NO: 1942 - protein, 17 aa, Artificial Sequence
  Non-cyclic GFR-binding peptide
  MOD_RES (14), (15): Xaa is C or S
IFLVSIPSLQTPAXXPK

SEQ ID NO: 1943 - protein, 18 aa, Artificial Sequence
  Non-cyclic GFR-binding peptide
  MOD_RES (14), (15): Xaa is C or S
IFLISIPSLDQSVXXPSA

SEQ ID NO: 1944 - protein, 20 aa, Artificial Sequence
  Non-cyclic GFR-binding peptide
  MOD_RES (14), (15): Xaa is C or S
YYVVPLPELKTPAXXPKPVY

SEQ ID NO: 1945 - protein, 11 aa, Artificial Sequence
  Non-cyclic GFR-binding peptide
IFLMSIPSLET

SEQ ID NO: 1946 - protein, 20 aa, Artificial Sequence
  Non-cyclic GFR-binding peptide
  MOD_RES (14), (15): Xaa is C or S
YYLITLPELRTPVXXTPPTS

SEQ ID NO: 1947 - protein, 12 aa, Artificial Sequence
  Non-cyclic GFR-binding peptide
YYVVPLPELQTP

SEQ ID NO: 1948 - protein, 18 aa, Artificial Sequence
  Non-cyclic GFR-binding peptide
  MOD_RES (14), (15): Xaa is C or S
YYLVTLPELKTPAXXPKP

SEQ ID NO: 1949 - protein, 18 aa, Artificial Sequence
  Non-cyclic GFR-binding peptide
  MOD_RES (14), (15): Xaa is C or S
YYVMPLPELETPVXXAKP

SEQ ID NO: 1950 - protein, 18 aa, Artificial Sequence
  Non-cyclic GFR-binding peptide
  MOD_RES (14), (15): Xaa is C or S
YYVIPLPELDQSVXXPSA

SEQ ID NO: 1951 - protein, 10 aa, Artificial Sequence
  Non-cyclic GFR-binding peptide
IFLVSIPSLK

SEQ ID NO: 1952 - protein, 10 aa, Artificial Sequence
  Non-cyclic GFR-binding peptide
LYLISIASLR

SEQ ID NO: 1953 - protein, 20 aa, Artificial Sequence
  Non-cyclic GFR-binding peptide
  MOD_RES (14), (15): Xaa is C or S
IFLISIPSLAQPVXXPAASA

SEQ ID NO: 1954 - protein, 10 aa, Artificial Sequence
  Non-cyclic GFR-binding peptide
IFLMSIPSLE

SEQ ID NO: 1955 - protein, 13 aa, Artificial Sequence
  Non-cyclic GFR-binding peptide
YYLITLPELAQPV

SEQ ID NO: 1956 - protein, 17 aa, Artificial Sequence
  Non-cyclic GFR-binding peptide
  MOD_RES (14), (15): Xaa is C or S
YYVIPLPELRTPVXXTP

SEQ ID NO: 1957 - protein, 13 aa, Artificial Sequence
  Non-cyclic GFR-binding peptide
YYLVTLPELQTPA

SEQ ID NO: 1958 - protein, 18 aa, Artificial Sequence
  Non-cyclic GFR-binding peptide
  MOD_RES (14), (15): Xaa is C or S
YYLITLPELRTPVXXTPP

SEQ ID NO: 1959 - protein, 12 aa, Artificial Sequence
  Non-cyclic GFR-binding peptide
YYLVTLPELQTP

SEQ ID NO: 1960 - protein, 18 aa, Artificial Sequence
  Non-cyclic GFR-binding peptide
  MOD_RES (14), (15): Xaa is C or S
YYVVPLPELKTPAXXPKP

SEQ ID NO: 1961 - protein, 11 aa, Artificial Sequence
  Non-cyclic GFR-binding peptide
LYLISIASLRT

SEQ ID NO: 1962 - protein, 11 aa, Artificial Sequence
  Non-cyclic GFR-binding peptide
IFLVSIPSLKT

SEQ ID NO: 1963 - protein, 13 aa, Artificial Sequence
  Non-cyclic GFR-binding peptide
YYLITLPELRTPV

SEQ ID NO: 1964 - protein, 11 aa, Artificial Sequence
  Non-cyclic GFR-binding peptide
YYVMPLPELET

SEQ ID NO: 1965 - protein, 20 aa, Artificial Sequence
  Non-cyclic GFR-binding peptide
  MOD_RES (14), (15): Xaa is C or S
IFLISIPSLDQPVXXPSASA

SEQ ID NO: 1966 - protein, 17 aa, Artificial Sequence
  Non-cyclic GFR-binding peptide
  MOD_RES (14), (15): Xaa is C or S
IFLVSIPSLKTPAXXPK

SEQ ID NO: 1967 - protein, 12 aa, Artificial Sequence
  Non-cyclic GFR-binding peptide
YYVIPLPELRTP

SEQ ID NO: 1968 - protein, 16 aa, Artificial Sequence
  Non-cyclic GFR-binding peptide
  MOD_RES (14), (15): Xaa is C or S
YYLITLPELAQPVXXP

SEQ ID NO: 1969 - protein, 11 aa, Artificial Sequence
  Non-cyclic GFR-binding peptide
YYVIPLPELDQ

SEQ ID NO: 1970 - protein, 18 aa, Artificial Sequence
  Non-cyclic GFR-binding peptide
  MOD_RES (14), (15): Xaa is C or S
YYLMTLPELETPVXXAKP

SEQ ID NO: 1971 - protein, 17 aa, Artificial Sequence
  Non-cyclic GFR-binding peptide
  MOD_RES (14), (15): Xaa is C or S
IFLMSIPSLETPVXXAK

SEQ ID NO: 1972 - protein, 10 aa, Artificial Sequence
  Non-cyclic GFR-binding peptide
YYLMTLPELE

SEQ ID NO: 1973 - protein, 17 aa, Artificial Sequence
  Non-cyclic GFR-binding peptide
  MOD_RES (14), (15): Xaa is C or S
IFLISIPSLAQPVXXPA

SEQ ID NO: 1974 - protein, 20 aa, Artificial Sequence
  Non-cyclic GFR-binding peptide
  MOD_RES (14), (15): Xaa is C or S
YYVIPLPELDQPVXXPSASA

SEQ ID NO: 1975 - protein, 17 aa, Artificial Sequence
  Non-cyclic GFR-binding peptide
  MOD_RES (14), (15): Xaa is C or S
YYVVPLPELKTPAXXPK

SEQ ID NO: 1976 - protein, 12 aa, Artificial Sequence
  Non-cyclic GFR-binding peptide
YYVIPLPELDQS

SEQ ID NO: 1977 - protein, 14 aa, Artificial Sequence
  Non-cyclic GFR-binding peptide
  MOD_RES (14), (14): Xaa is C or S
FYLISIANLRTPVX

SEQ ID NO: 1978 - protein, 12 aa, Artificial Sequence
  Non-cyclic GFR-binding peptide
YYLITLPELRTP

SEQ ID NO: 1979 - protein, 14 aa, Artificial Sequence
  Non-cyclic GFR-binding peptide
  MOD_RES (14), (14): Xaa is C or S
LYLISIASLRTPVX

SEQ ID NO: 1980 - protein, 11 aa, Artificial Sequence
  Non-cyclic GFR-binding peptide
YYLMTLPELET

SEQ ID NO: 1981 - protein, 19 aa, Artificial Sequence
  Non-cyclic GFR-binding peptide
  MOD_RES (14), (15): Xaa is C or S
YYLITLPELRTPVXXTPPT

SEQ ID NO: 1982 - protein, 20 aa, Artificial Sequence
  Non-cyclic GFR-binding peptide
  MOD_RES (14), (15): Xaa is C or S
YYVIPLPELRTPVXXTPPTS

SEQ ID NO: 1983 - protein, 11 aa, Artificial Sequence
  Non-cyclic GFR-binding peptide
IFLISIPSLDQ

SEQ ID NO: 1984 - protein, 18 aa, Artificial Sequence
  Non-cyclic GFR-binding peptide
  MOD_RES (14), (15): Xaa is C or S
IFLMSIPSLETPVXXAKP

SEQ ID NO: 1985 - protein, 17 aa, Artificial Sequence
  Non-cyclic GFR-binding peptide
  MOD_RES (14), (15): Xaa is C or S
YYVMPLPELETPVXXAK

SEQ ID NO: 1986 - protein, 18 aa, Artificial Sequence
  Non-cyclic GFR-binding peptide
  MOD_RES (14), (15): Xaa is C or S
FYLISIANLRTPVXXTPP

SEQ ID NO: 1987 - protein, 11 aa, Artificial Sequence
  Non-cyclic GFR-binding peptide
YYLVTLPELKT

SEQ ID NO: 1988 - protein, 15 aa, Artificial Sequence
  Non-cyclic GFR-binding peptide
  MOD_RES (14), (15): Xaa is C or S
YYVVPLPELQTPAXX

SEQ ID NO: 1989 - protein, 17 aa, Artificial Sequence
  Non-cyclic GFR-binding peptide
  MOD_RES (14), (15): Xaa is C or S
YYLVTLPELKTPAXXPK

SEQ ID NO: 1990 - protein, 19 aa, Artificial Sequence
  Non-cyclic GFR-binding peptide
  MOD_RES (14), (15): Xaa is C or S
IFLISIPSLDQSVXXPSAS

SEQ ID NO: 1991 - protein, 20 aa, Artificial Sequence
  Non-cyclic GFR-binding peptide
  MOD_RES (14), (15): Xaa is C or S
YYLITLPELAQPVXXPAASA

SEQ ID NO: 1992 - protein, 10 aa, Artificial Sequence
  Non-cyclic GFR-binding peptide
IFLVSIPSLQ

SEQ ID NO: 1993 - protein, 14 aa, Artificial Sequence
  Non-cyclic GFR-binding peptide
  MOD_RES (14), (14): Xaa is C or S
YYVIPLPELDQPVX

SEQ ID NO: 1994 - protein, 15 aa, Artificial Sequence
  Non-cyclic GFR-binding peptide
  MOD_RES (14), (15): Xaa is C or S
IFLMSIPSLETPVXX

SEQ ID NO: 1995 - protein, 18 aa, Artificial Sequence
  Non-cyclic GFR-binding peptide
  MOD_RES (14), (15): Xaa is C or S
YYLVTLPELQTPAXXPKP

SEQ ID NO: 1996 - protein, 20 aa, Artificial Sequence
  Non-cyclic GFR-binding peptide
  MOD_RES (14), (15): Xaa is C or S
YYVVPLPELQTPAXXPKPVT

SEQ ID NO: 1997 - protein, 16 aa, Artificial Sequence
  Non-cyclic GFR-binding peptide
  MOD_RES (14), (15): Xaa is C or S
YYVVPLPELQTPAXXP

SEQ ID NO: 1998 - protein, 17 aa, Artificial Sequence
  Non-cyclic GFR-binding peptide
  MOD_RES (14), (15): Xaa is C or S
LYLISIASLRTPVXXTP

SEQ ID NO: 1999 - protein, 19 aa, Artificial Sequence
  Non-cyclic GFR-binding peptide
  MOD_RES (14), (15): Xaa is C or S
FYLISIANLRTPVXXTPPT

SEQ ID NO: 2000 - protein, 18 aa, Artificial Sequence
  Non-cyclic GFR-binding peptide
  MOD_RES (14), (15): Xaa is C or S
YYLITLPELAQPVXXPAA

SEQ ID NO: 2001 - protein, 11 aa, Artificial Sequence
  Non-cyclic GFR-binding peptide
YYVVPLPELKT

SEQ ID NO: 2002 - protein, 19 aa, Artificial Sequence
  Non-cyclic GFR-binding peptide
  MOD_RES (14), (15): Xaa is C or S
YYVVPLPELQTPAXXPKPV

SEQ ID NO: 2003 - protein, 20 aa, Artificial Sequence
  Non-cyclic GFR-binding peptide
  MOD_RES (14), (15): Xaa is C or S
FYLISIANLRTPVXXTPPTS

SEQ ID NO: 2004 - protein, 15 aa, Artificial Sequence
  Non-cyclic GFR-binding peptide
  MOD_RES (14), (15): Xaa is C or S
YYLVTLPELQTPAXX

SEQ ID NO: 2005 - protein, 13 aa, Artificial Sequence
  Non-cyclic GFR-binding peptide
FYLISIANLRTPV

SEQ ID NO: 2006 - protein, 17 aa, Artificial Sequence
  Non-cyclic GFR-binding peptide
  MOD_RES (14), (15): Xaa is C or S
IFLISIPSLDQPVXXPS

SEQ ID NO: 2007 - protein, 16 aa, Artificial Sequence
  Non-cyclic GFR-binding peptide
  MOD_RES (14), (15): Xaa is C or S
IFLISIPSLAQPVXXP

SEQ ID NO: 2008 - protein, 18 aa, Artificial Sequence
  Non-cyclic GFR-binding peptide
  MOD_RES (14), (15): Xaa is C or S
YYVIPLPELDQPVXXPSA

SEQ ID NO: 2009 - protein, 12 aa, Artificial Sequence
  Non-cyclic GFR-binding peptide
IFLVSIPSLQTP

SEQ ID NO: 2010 - protein, 15 aa, Artificial Sequence
  Non-cyclic GFR-binding peptide
  MOD_RES (14), (15): Xaa is C or S
LYLISIASLRTPVXX

SEQ ID NO: 2011 - protein, 12 aa, Artificial Sequence
  Non-cyclic GFR-binding peptide
IFLVSIPSLKTP

SEQ ID NO: 2012 - protein, 12 aa, Artificial Sequence
  Non-cyclic GFR-binding peptide
YYLITLPELAQP

SEQ ID NO: 2013 - protein, 15 aa, Artificial Sequence
  Non-cyclic GFR-binding peptide
  MOD_RES (14), (15): Xaa is C or S
FYLISIANLRTPVXX

SEQ ID NO: 2014 - protein, 18 aa, Artificial Sequence
  Non-cyclic GFR-binding peptide
  MOD_RES (14), (14): Xaa is C or S
YYVVPLPELKTPAXTPKT

SEQ ID NO: 2015 - protein, 11 aa, Artificial Sequence
  Non-cyclic GFR-binding peptide
FYLISIANLRT

SEQ ID NO: 2016 - protein, 15 aa, Artificial Sequence
  Non-cyclic GFR-binding peptide
  MOD_RES (14), (15): Xaa is C or S
YYLITLPELAQPVXX

SEQ ID NO: 2017 - protein, 13 aa, Artificial Sequence
  Non-cyclic GFR-binding peptide
YYLVTLPELKTPA

SEQ ID NO: 2018 - protein, 20 aa, Artificial Sequence
  Non-cyclic GFR-binding peptide
  MOD_RES (14), (15): Xaa is C or S
YYVMPLPELETPVXXAKPIK

SEQ ID NO: 2019 - protein, 10 aa, Artificial Sequence
  Non-cyclic GFR-binding peptide
YYLITLPELA

SEQ ID NO: 2020 - protein, 14 aa, Artificial Sequence
  Non-cyclic GFR-binding peptide
  MOD_RES (14), (14): Xaa is C or S
YYLITLPELAQPVX

SEQ ID NO: 2021 - protein, 17 aa, Artificial Sequence
  Non-cyclic GFR-binding peptide
  MOD_RES (14), (15): Xaa is C or S
IFLISIPSLDQSVXXPS

SEQ ID NO: 2022 - protein, 15 aa, Artificial Sequence
  Non-cyclic GFR-binding peptide
  MOD_RES (14), (15): Xaa is C or S
YYLVTLPELKTPAXX

SEQ ID NO: 2023 - protein, 20 aa, Artificial Sequence
  Non-cyclic GFR-binding peptide
  MOD_RES (14), (14): Xaa is C or S
YYLVTLPELKTPAXTPKTVH

SEQ ID NO: 2024 - protein, 12 aa, Artificial Sequence
  Non-cyclic GFR-binding peptide
YYVIPLPELDQP

SEQ ID NO: 2025 - protein, 14 aa, Artificial Sequence
  Non-cyclic GFR-binding peptide
  MOD_RES (14), (14): Xaa is C or S
YYVVPLPELKTPAX

SEQ ID NO: 2026 - protein, 16 aa, Artificial Sequence
  Non-cyclic GFR-binding peptide
  MOD_RES (14), (15): Xaa is C or S
YYVIPLPELRTPVXXT

SEQ ID NO: 2027 - protein, 18 aa, Artificial Sequence
  Non-cyclic GFR-binding peptide
  MOD_RES (14), (15): Xaa is C or S
YYVVPLPELQTPAXXPKP

SEQ ID NO: 2028 - protein, 16 aa, Artificial Sequence
  Non-cyclic GFR-binding peptide
  MOD_RES (14), (15): Xaa is C or S
YYLVTLPELQTPAXXP

SEQ ID NO: 2029 - protein, 17 aa, Artificial Sequence
  Non-cyclic GFR-binding peptide
  MOD_RES (14), (15): Xaa is C or S
FYLISIANLRTPVXXTP

SEQ ID NO: 2030 - protein, 19 aa, Artificial Sequence
  Non-cyclic GFR-binding peptide
  MOD_RES (14), (14): Xaa is C or S
YYVVPLPELKTPAXTPKTV

SEQ ID NO: 2031 - protein, 16 aa, Artificial Sequence
  Non-cyclic GFR-binding peptide
  MOD_RES (14), (15): Xaa is C or S
IFLISIPSLDQSVXXP

SEQ ID NO: 2032 - protein, 13 aa, Artificial Sequence
  Non-cyclic GFR-binding peptide
YYVVPLPELQTPA

SEQ ID NO: 2033 - protein, 16 aa, Artificial Sequence
  Non-cyclic GFR-binding peptide
  MOD_RES (14), (15): Xaa is C or S
YYVMPLPELETPVXXA

SEQ ID NO: 2034 - protein, 12 aa, Artificial Sequence
  Non-cyclic GFR-binding peptide
IFLMSIPSLETP

SEQ ID NO: 2035 - protein, 18 aa, Artificial Sequence
  Non-cyclic GFR-binding peptide
  MOD_RES (14), (15): Xaa is C or S
LYLISIASLRTPVXXTPP

SEQ ID NO: 2036 - protein, 14 aa, Artificial Sequence
  Non-cyclic GFR-binding peptide
  MOD_RES (14), (14): Xaa is C or S
IFLMSIPSLETPVX

SEQ ID NO: 2037 - protein, 13 aa, Artificial Sequence
  Non-cyclic GFR-binding peptide
APTKLSPISVLFI

SEQ ID NO: 2038 - protein, 14 aa, Artificial Sequence
  Non-cyclic GFR-binding peptide
  MOD_RES (1), (1): Xaa is C or S
XVPQALSPISILFI

SEQ ID NO: 2039 - protein, 20 aa, Artificial Sequence
  Non-cyclic GFR-binding peptide
  MOD_RES (7), (7): Xaa is C or S
HVTKPTXAPTKLSPISVLFI

SEQ ID NO: 2040 - protein, 11 aa, Artificial Sequence
  Non-cyclic GFR-binding peptide
TQLEPLTVLYY

SEQ ID NO: 2041 - protein, 13 aa, Artificial Sequence
  Non-cyclic GFR-binding peptide
VPQDLEPLPIVYY

SEQ ID NO: 2042 - protein, 19 aa, Artificial Sequence
  Non-cyclic GFR-binding peptide
  MOD_RES (5), (6): Xaa is C or S
VPKPXXAPTKLEPLTVLYY

SEQ ID NO: 2043 - protein, 17 aa, Artificial Sequence
  Non-cyclic GFR-binding peptide
  MOD_RES (3), (4): Xaa is C or S
KPXXAPTQLEPLTVLYY

SEQ ID NO: 2044 - protein, 18 aa, Artificial Sequence
  Non-cyclic GFR-binding peptide
  MOD_RES (5), (5): Xaa is C or S
TKPTXAPTKLEPLTVLYY

SEQ ID NO: 2045 - protein, 16 aa, Artificial Sequence
  Non-cyclic GFR-binding peptide
  MOD_RES (2), (3): Xaa is C or S
PXXAPTKLEPLPVVYY

SEQ ID NO: 2046 - protein, 16 aa, Artificial Sequence
  Non-cyclic GFR-binding peptide
  MOD_RES (3), (3): Xaa is C or S
PTXAPTKLEPLTVLYY

SEQ ID NO: 2047 - protein, 13 aa, Artificial Sequence
  Non-cyclic GFR-binding peptide
VPTRLSAISILYL

SEQ ID NO: 2048 - protein, 19 aa, Artificial Sequence
  Non-cyclic GFR-binding peptide
  MOD_RES (5), (6): Xaa is C or S
SASPXXVPQDLSPISILFI

SEQ ID NO: 2049 - protein, 9 aa, Artificial Sequence
  Non-cyclic GFR-binding peptide
LEPLPVVYY

SEQ ID NO: 2050 - protein, 20 aa, Artificial Sequence
  Non-cyclic GFR-binding peptide
  MOD_RES (6), (7): Xaa is C or S
YVPKPXXAPTKLSPISVLFI

SEQ ID NO: 2051 - protein, 16 aa, Artificial Sequence
  Non-cyclic GFR-binding peptide
  MOD_RES (2), (3): Xaa is C or S
AXXVPTELSPISMLFI

SEQ ID NO: 2052 - protein, 20 aa, Artificial Sequence
  Non-cyclic GFR-binding peptide
  MOD_RES (6), (7): Xaa is C or S
SIPKAXXVPTELSPISMLFI

SEQ ID NO: 2053 - protein, 10 aa, Artificial Sequence
  Non-cyclic GFR-binding peptide
DLEPLPIVYY

SEQ ID NO: 2054 - protein, 13 aa, Artificial Sequence
  Non-cyclic GFR-binding peptide
VPTELEPLTMLYY

SEQ ID NO: 2055 - protein, 11 aa, Artificial Sequence
  Non-cyclic GFR-binding peptide
TRLEPLPIVYY

SEQ ID NO: 2056 - protein, 19 aa, Artificial Sequence
  Non-cyclic GFR-binding peptide
  MOD_RES (5), (6): Xaa is C or S
VPKPXXAPTKLEPLPVVYY

SEQ ID NO: 2057 - protein, 15 aa, Artificial Sequence
  Non-cyclic GFR-binding peptide
  MOD_RES (1), (2): Xaa is C or S
XXVPTELEPLTMLYY

SEQ ID NO: 2058 - protein, 9 aa, Artificial Sequence
  Non-cyclic GFR-binding peptide
LSPISMLFI

SEQ ID NO: 2059 - protein, 15 aa, Artificial Sequence
  Non-cyclic GFR-binding peptide
  MOD_RES (1), (2): Xaa is C or S
XXVSQDLSPISILFI

SEQ ID NO: 2060 - protein, 16 aa, Artificial Sequence
  Non-cyclic GFR-binding peptide
  MOD_RES (2), (3): Xaa is C or S
PXXVPQDLEPLPIVYY

SEQ ID NO: 2061 - protein, 11 aa, Artificial Sequence
  Non-cyclic GFR-binding peptide
TQLEPLPVVYY

SEQ ID NO: 2062 - protein, 17 aa, Artificial Sequence
  Non-cyclic GFR-binding peptide
  MOD_RES (4), (4): Xaa is C or S
KPTXAPTKLSPISVLFI

SEQ ID NO: 2063 - protein, 20 aa, Artificial Sequence
  Non-cyclic GFR-binding peptide
  MOD_RES (6), (7): Xaa is C or S
ASASPXXVSQDLEPLPIVYY

SEQ ID NO: 2064 - protein, 20 aa, Artificial Sequence
  Non-cyclic GFR-binding peptide
  MOD_RES (6), (7): Xaa is C or S
STPPTXXVPTRLSAISILYL

SEQ ID NO: 2065 - protein, 17 aa, Artificial Sequence
  Non-cyclic GFR-binding peptide
  MOD_RES (3), (4): Xaa is C or S
KPXXAPTQLEPLPVVYY

SEQ ID NO: 2066 - protein, 14 aa, Artificial Sequence
  Non-cyclic GFR-binding peptide
  MOD_RES (1), (1): Xaa is C or S
XAPTQLEPLPVVYY

SEQ ID NO: 2067 - protein, 17 aa, Artificial Sequence
  Non-cyclic GFR-binding peptide
  MOD_RES (4), (4): Xaa is C or S
KPTXAPTKLEPLPVVYY

SEQ ID NO: 2068 - protein, 19 aa, Artificial Sequence
  Non-cyclic GFR-binding peptide
  MOD_RES (5), (6): Xaa is C or S
IPKAXXVPTELSPISMLFI

SEQ ID NO: 2069 - protein, 10 aa, Artificial Sequence
  Non-cyclic GFR-binding peptide
RLEPLTILYY

SEQ ID NO: 2070 - protein, 16 aa, Artificial Sequence
  Non-cyclic GFR-binding peptide
  MOD_RES (3), (3): Xaa is C or S
PTXAPTKLEPLPVVYY

SEQ ID NO: 2071 - protein, 19 aa, Artificial Sequence
  Non-cyclic GFR-binding peptide
  MOD_RES (5), (6): Xaa is C or S
TPPTXXVPTRLSAISILYL

SEQ ID NO: 2072 - protein, 16 aa, Artificial Sequence
  Non-cyclic GFR-binding peptide
  MOD_RES (2), (3): Xaa is C or S
PXXAPTKLEPLTVLYY

SEQ ID NO: 2073 - protein, 17 aa, Artificial Sequence
  Non-cyclic GFR-binding peptide
  MOD_RES (3), (4): Xaa is C or S
SPXXVSQDLEPLPIVYY

SEQ ID NO: 2074 - protein, 19 aa, Artificial Sequence
  Non-cyclic GFR-binding peptide
  MOD_RES (5), (6): Xaa is C or S
SAAPXXVPQALSPISILFI

SEQ ID NO: 2075 - protein, 14 aa, Artificial Sequence
  Non-cyclic GFR-binding peptide
  MOD_RES (1), (1): Xaa is C or S
XVPTRLEPLPIVYY

SEQ ID NO: 2076 - protein, 20 aa, Artificial Sequence
  Non-cyclic GFR-binding peptide
  MOD_RES (6), (7): Xaa is C or S
KIPKAXXVPTELEPLTMLYY

SEQ ID NO: 2077 - protein, 15 aa, Artificial Sequence
  Non-cyclic GFR-binding peptide
  MOD_RES (1), (2): Xaa is C or S
XXAPTKLEPLPVVYY

SEQ ID NO: 2078 - protein, 15 aa, Artificial Sequence
  Non-cyclic GFR-binding peptide
  MOD_RES (2), (2): Xaa is C or S
TXAPTKLSPISVLFI

SEQ ID NO: 2079 - protein, 13 aa, Artificial Sequence
  Non-cyclic GFR-binding peptide
VPQDLSPISILFI

SEQ ID NO: 2080 - protein, 13 aa, Artificial Sequence
  Non-cyclic GFR-binding peptide
APTKLEPLPVVYY

SEQ ID NO: 2081 - protein, 13 aa, Artificial Sequence
  Non-cyclic GFR-binding peptide
VPTELSPISMLFI

SEQ ID NO: 2082 - protein, 10 aa, Artificial Sequence
  Non-cyclic GFR-binding peptide
RLEPLPIVYY

SEQ ID NO: 2083 - protein, 20 aa, Artificial Sequence
  Non-cyclic GFR-binding peptide
  MOD_RES (6), (7): Xaa is C or S
SIPKAXXVPTELEPLPMVYY

SEQ ID NO: 2084 - protein, 16 aa, Artificial Sequence
  Non-cyclic GFR-binding peptide
  MOD_RES (2), (3): Xaa is C or S
TXXVPTRLEPLTILYY

SEQ ID NO: 2085 - protein, 12 aa, Artificial Sequence
  Non-cyclic GFR-binding peptide
PTRLSAISILYL

SEQ ID NO: 2086 - protein, 14 aa, Artificial Sequence
  Non-cyclic GFR-binding peptide
  MOD_RES (1), (1): Xaa is C or S
XVPTRLEPLTILYY

SEQ ID NO: 2087 - protein, 14 aa, Artificial Sequence
  Non-cyclic GFR-binding peptide
  MOD_RES (1), (1): Xaa is C or S
XAPTKLEPLTVLYY

SEQ ID NO: 2088 - protein, 16 aa, Artificial Sequence
  Non-cyclic GFR-binding peptide
  MOD_RES (3), (3): Xaa is C or S
PTXAPTKLSPISVLFI

SEQ ID NO: 2089 - protein, 17 aa, Artificial Sequence
  Non-cyclic GFR-binding peptide
  MOD_RES (4), (4): Xaa is C or S
KPTXAPTKLEPLTVLYY

SEQ ID NO: 2090 - protein, 14 aa, Artificial Sequence
  Non-cyclic GFR-binding peptide
  MOD_RES (1), (1): Xaa is C or S
XVSQDLSPISILFI

SEQ ID NO: 2091 - protein, 19 aa, Artificial Sequence
  Non-cyclic GFR-binding peptide
  MOD_RES (6), (6): Xaa is C or S
VTKPTXAPTKLEPLTVLYY

SEQ ID NO: 2092 - protein, 9 aa, Artificial Sequence
  Non-cyclic GFR-binding peptide
LSPISVLFI

SEQ ID NO: 2093 - protein, 15 aa, Artificial Sequence
  Non-cyclic GFR-binding peptide
  MOD_RES (2), (2): Xaa is C or S
TXAPTKLEPLPVVYY

SEQ ID NO: 2094 - protein, 16 aa, Artificial Sequence
  Non-cyclic GFR-binding peptide
  MOD_RES (2), (3): Xaa is C or S
AXXVPTELEPLTMLYY

SEQ ID NO: 2095 - protein, 11 aa, Artificial Sequence
  Non-cyclic GFR-binding peptide
QALSPISILFI

SEQ ID NO: 2096 - protein, 20 aa, Artificial Sequence
  Non-cyclic GFR-binding peptide
  MOD_RES (6), (7): Xaa is C or S
ASASPXXVSQDLSPISILFI

SEQ ID NO: 2097 - protein, 15 aa, Artificial Sequence
  Non-cyclic GFR-binding peptide
  MOD_RES (1), (2): Xaa is C or S
XXVPQDLEPLPIVYY

SEQ ID NO: 2098 - protein, 14 aa, Artificial Sequence
  Non-cyclic GFR-binding peptide
  MOD_RES (1), (1): Xaa is C or S
XAPTQLEPLTVLYY

SEQ ID NO: 2099 - protein, 13 aa, Artificial Sequence
  Non-cyclic GFR-binding peptide
VSQDLSPISILFI

SEQ ID NO: 2100 - protein, 18 aa, Artificial Sequence
  Non-cyclic GFR-binding peptide
  MOD_RES (4), (5): Xaa is C or S
ASPXXVPQDLSPISILFI

SEQ ID NO: 2101 - protein, 20 aa, Artificial Sequence
  Non-cyclic GFR-binding peptide
  MOD_RES (7), (7): Xaa is C or S
HVTKPTXAPTKLEPLPVVYY

SEQ ID NO: 2102 - protein, 19 aa, Artificial Sequence
  Non-cyclic GFR-binding peptide
  MOD_RES (5), (6): Xaa is C or S
IPKAXXVPTELEPLTMLYY

SEQ ID NO: 2103 - protein, 15 aa, Artificial Sequence
  Non-cyclic GFR-binding peptide
  MOD_RES (1), (2): Xaa is C or S
XXVPQALSPISILFI

SEQ ID NO: 2104 - protein, 16 aa, Artificial Sequence
  Non-cyclic GFR-binding peptide
  MOD_RES (2), (3): Xaa is C or S
PXXVPQDLSPISILFI

SEQ ID NO: 2105 - protein, 17 aa, Artificial Sequence
  Non-cyclic GFR-binding peptide
  MOD_RES (3), (4): Xaa is C or S
KAXXVPTELEPLTMLYY

SEQ ID NO: 2106 - protein, 16 aa, Artificial Sequence
  Non-cyclic GFR-binding peptide
  MOD_RES (2), (3): Xaa is C or S
PXXAPTKLSPISVLFI

SEQ ID NO: 2107 - protein, 17 aa, Artificial Sequence
  Non-cyclic GFR-binding peptide
  MOD_RES (3), (4): Xaa is C or S
APXXVPQALEPLTILYY

SEQ ID NO: 2108 - protein, 10 aa, Artificial Sequence
  Non-cyclic GFR-binding peptide
QLEPLTVLYY

SEQ ID NO: 2109 - protein, 19 aa, Artificial Sequence
  Non-cyclic GFR-binding peptide
  MOD_RES (5), (6): Xaa is C or S
SASPXXVPQDLEPLPIVYY

SEQ ID NO: 2110 - protein, 11 aa, Artificial Sequence
  Non-cyclic GFR-binding peptide
QALEPLTILYY

SEQ ID NO: 2111 - protein, 14 aa, Artificial Sequence
  Non-cyclic GFR-binding peptide
  MOD_RES (1), (1): Xaa is C or S
XAPTQLSPISVLFI

SEQ ID NO: 2112 - protein, 19 aa, Artificial Sequence
  Non-cyclic GFR-binding peptide
  MOD_RES (5), (6): Xaa is C or S
VPKPXXAPTQLSPISVLFI

SEQ ID NO: 2113 - protein, 12 aa, Artificial Sequence
  Non-cyclic GFR-binding peptide
PTRLNAISILYF

SEQ ID NO: 2114 - protein, 20 aa, Artificial Sequence
  Non-cyclic GFR-binding peptide
  MOD_RES (6), (7): Xaa is C or S
TVPKPXXAPTQLSPISVLFI

SEQ ID NO: 2115 - protein, 9 aa, Artificial Sequence
  Non-cyclic GFR-binding peptide
LEPLPMVYY

SEQ ID NO: 2116 - protein, 14 aa, Artificial Sequence
  Non-cyclic GFR-binding peptide
  MOD_RES (1), (1): Xaa is C or S
XVSQDLEPLPIVYY

SEQ ID NO: 2117 - protein, 13 aa, Artificial Sequence
  Non-cyclic GFR-binding peptide
VPTELEPLPMVYY

SEQ ID NO: 2118 - protein, 11 aa, Artificial Sequence
  Non-cyclic GFR-binding peptide
TQLSPISVLFI

SEQ ID NO: 2119 - protein, 18 aa, Artificial Sequence
  Non-cyclic GFR-binding peptide
  MOD_RES (4), (5): Xaa is C or S
AAPXXVPQALSPISILFI

SEQ ID NO: 2120 - protein, 15 aa, Artificial Sequence
  Non-cyclic GFR-binding peptide
  MOD_RES (1), (2): Xaa is C or S
XXVPTELEPLPMVYY

SEQ ID NO: 2121 - protein, 9 aa, Artificial Sequence
  Non-cyclic GFR-binding peptide
LEPLTVLYY

SEQ ID NO: 2122 - protein, 13 aa, Artificial Sequence
  Non-cyclic GFR-binding peptide
APTQLSPISVLFI

SEQ ID NO: 2123 - protein, 13 aa, Artificial Sequence
  Non-cyclic GFR-binding peptide
VSQDLEPLPIVYY

SEQ ID NO: 2124 - protein, 19 aa, Artificial Sequence
  Non-cyclic GFR-binding peptide
  MOD_RES (5), (6): Xaa is C or S
VPKPXXAPTQLEPLTVLYY

SEQ ID NO: 2125 - protein, 14 aa, Artificial Sequence
  Non-cyclic GFR-binding peptide
  MOD_RES (1), (1): Xaa is C or S
XVPTELEPLTMLYY

SEQ ID NO: 2126 - protein, 10 aa, Artificial Sequence
  Non-cyclic GFR-binding peptide
ALSPISILFI

SEQ ID NO: 2127 - protein, 15 aa, Artificial Sequence
  Non-cyclic GFR-binding peptide
  MOD_RES (1), (2): Xaa is C or S
XXVPTRLEPLPIVYY

SEQ ID NO: 2128 - protein, 20 aa, Artificial Sequence
  Non-cyclic GFR-binding peptide
  MOD_RES (6), (7): Xaa is C or S
YVPKPXXAPTKLEPLTVLYY

SEQ ID NO: 2129 - protein, 14 aa, Artificial Sequence
  Non-cyclic GFR-binding peptide
  MOD_RES (1), (1): Xaa is C or S
XVPTELEPLPMVYY

SEQ ID NO: 2130 - protein, 17 aa, Artificial Sequence
  Non-cyclic GFR-binding peptide
  MOD_RES (3), (4): Xaa is C or S
SPXXVPQDLEPLPIVYY

SEQ ID NO: 2131 - protein, 13 aa, Artificial Sequence
  Non-cyclic GFR-binding peptide
VPQALSPISILFI

SEQ ID NO: 2132 - protein, 16 aa, Artificial Sequence
  Non-cyclic GFR-binding peptide
  MOD_RES (2), (3): Xaa is C or S
PXXVSQDLEPLPIVYY

SEQ ID NO: 2133 - protein, 20 aa, Artificial Sequence
  Non-cyclic GFR-binding peptide
  MOD_RES (6), (7): Xaa is C or S
SIPKAXXVPTELEPLTMLYY

SEQ ID NO: 2134 - protein, 12 aa, Artificial Sequence
  Non-cyclic GFR-binding peptide
SQDLSPISILFI

SEQ ID NO: 2135 - protein, 16 aa, Artificial Sequence
  Non-cyclic GFR-binding peptide
  MOD_RES (2), (3): Xaa is C or S
TXXVPTRLNAISILYF

SEQ ID NO: 2136 - protein, 9 aa, Artificial Sequence
  Non-cyclic GFR-binding peptide
LEPLTMLYY

SEQ ID NO: 2137 - protein, 10 aa, Artificial Sequence
  Non-cyclic GFR-binding peptide
KLEPLTVLYY

SEQ ID NO: 2138 - protein, 15 aa, Artificial Sequence
  Non-cyclic GFR-binding peptide
  MOD_RES (1), (2): Xaa is C or S
XXVSQDLEPLPIVYY

SEQ ID NO: 2139 - protein, 12 aa, Artificial Sequence
  Non-cyclic GFR-binding peptide
PTELEPLTMLYY

SEQ ID NO: 2140 - protein, 20 aa, Artificial Sequence
  Non-cyclic GFR-binding peptide
  MOD_RES (6), (7): Xaa is C or S
TVPKPXXAPTQLEPLTVLYY

SEQ ID NO: 2141 - protein, 14 aa, Artificial Sequence
  Non-cyclic GFR-binding peptide
  MOD_RES (1), (1): Xaa is C or S
XAPTKLSPISVLFI

SEQ ID NO: 2142 - protein, 10 aa, Artificial Sequence
  Non-cyclic GFR-binding peptide
RLNAISILYF

SEQ ID NO: 2143 - protein, 12 aa, Artificial Sequence
  Non-cyclic GFR-binding peptide
PTKLEPLPVVYY

SEQ ID NO: 2144 - protein, 15 aa, Artificial Sequence
  Non-cyclic GFR-binding peptide
  MOD_RES (1), (2): Xaa is C or S
XXVPTRLEPLTILYY

SEQ ID NO: 2145 - protein, 16 aa, Artificial Sequence
  Non-cyclic GFR-binding peptide
  MOD_RES (2), (3): Xaa is C or S
PXXAPTQLSPISVLFI

SEQ ID NO: 2146 - protein, 10 aa, Artificial Sequence
  Non-cyclic GFR-binding peptide
DLSPISILFI

SEQ ID NO: 2147 - protein, 15 aa, Artificial Sequence
  Non-cyclic GFR-binding peptide
  MOD_RES (1), (2): Xaa is C or S
XXVPQDLSPISILFI

SEQ ID NO: 2148 - protein, 19 aa, Artificial Sequence
  Non-cyclic GFR-binding peptide
  MOD_RES (5), (6): Xaa is C or S
VPKPXXAPTKLSPISVLFI

SEQ ID NO: 2149 - protein, 19 aa, Artificial Sequence
  Non-cyclic GFR-binding peptide
  MOD_RES (5), (6): Xaa is C or S
SAAPXXVPQALEPLTILYY

SEQ ID NO: 2150 - protein, 14 aa, Artificial Sequence
  Non-cyclic GFR-binding peptide
  MOD_RES (1), (1): Xaa is C or S
XVPQDLSPISILFI

SEQ ID NO: 2151 - protein, 10 aa, Artificial Sequence
  Non-cyclic GFR-binding peptide
KLEPLPVVYY

SEQ ID NO: 2152 - protein, 19 aa, Artificial Sequence
  Non-cyclic GFR-binding peptide
  MOD_RES (5), (6): Xaa is C or S
TPPTXXVPTRLEPLPIVYY

SEQ ID NO: 2153 - protein, 17 aa, Artificial Sequence
  Non-cyclic GFR-binding peptide
  MOD_RES (3), (4): Xaa is C or S
PTXXVPTRLEPLTILYY

SEQ ID NO: 2154 - protein, 10 aa, Artificial Sequence
  Non-cyclic GFR-binding peptide
QLEPLPVVYY

SEQ ID NO: 2155 - protein, 15 aa, Artificial Sequence
  Non-cyclic GFR-binding peptide
  MOD_RES (1), (2): Xaa is C or S
XXAPTKLSPISVLFI

SEQ ID NO: 2156 - protein, 12 aa, Artificial Sequence
  Non-cyclic GFR-binding peptide
PTELEPLPMVYY

SEQ ID NO: 2157 - protein, 18 aa, Artificial Sequence
  Non-cyclic GFR-binding peptide
  MOD_RES (4), (5): Xaa is C or S
PPTXXVPTRLEPLPIVYY

SEQ ID NO: 2158 - protein, 18 aa, Artificial Sequence
  Non-cyclic GFR-binding peptide
  MOD_RES (4), (5): Xaa is C or S
PKPXXAPTKLSPISVLFI

SEQ ID NO: 2159 - protein, 18 aa, Artificial Sequence
  Non-cyclic GFR-binding peptide
  MOD_RES (4), (5): Xaa is C or S
PKPXXAPTQLSPISVLFI

SEQ ID NO: 2160 - protein, 15 aa, Artificial Sequence
  Non-cyclic GFR-binding peptide
  MOD_RES (1), (2): Xaa is C or S
XXAPTQLSPISVLFI

SEQ ID NO: 2161 - protein, 19 aa, Artificial Sequence
  Non-cyclic GFR-binding peptide
  MOD_RES (6), (6): Xaa is C or S
VTKPTXAPTKLSPISVLFI

SEQ ID NO: 2162 - protein, 16 aa, Artificial Sequence
  Non-cyclic GFR-binding peptide
  MOD_RES (2), (3): Xaa is C or S
TXXVPTRLSAISILYL

SEQ ID NO: 2163 - protein, 12 aa, Artificial Sequence
  Non-cyclic GFR-binding peptide
PQALSPISILFI

SEQ ID NO: 2164 - protein, 18 aa, Artificial Sequence
  Non-cyclic GFR-binding peptide
  MOD_RES (5), (5): Xaa is C or S
TKPTXAPTKLSPISVLFI

SEQ ID NO: 2165 - protein, 19 aa, Artificial Sequence
  Non-cyclic GFR-binding peptide
  MOD_RES (5), (6): Xaa is C or S
IPKAXXVPTELEPLPMVYY

SEQ ID NO: 2166 - protein, 12 aa, Artificial Sequence
  Non-cyclic GFR-binding peptide
PTKLEPLTVLYY

SEQ ID NO: 2167 - protein, 13 aa, Artificial Sequence
  Non-cyclic GFR-binding peptide
VPTRLEPLPIVYY

SEQ ID NO: 2168 - protein, 12 aa, Artificial Sequence
  Non-cyclic GFR-binding peptide
PQDLSPISILFI

SEQ ID NO: 2169 - protein, 20 aa, Artificial Sequence
  Non-cyclic GFR-binding peptide
  MOD_RES (6), (7): Xaa is C or S
KIPKAXXVPTELSPISMLFI

SEQ ID NO: 2170 - protein, 15 aa, Artificial Sequence
  Non-cyclic GFR-binding peptide
  MOD_RES (2), (2): Xaa is C or S
TXAPTKLEPLTVLYY

SEQ ID NO: 2171 - protein, 10 aa, Artificial Sequence
  Non-cyclic GFR-binding peptide
ELEPLPMVYY

SEQ ID NO: 2172 - protein, 19 aa, Artificial Sequence
  Non-cyclic GFR-binding peptide
  MOD_RES (5), (6): Xaa is C or S
SASPXXVSQDLEPLPIVYY

SEQ ID NO: 2173 - protein, 11 aa, Artificial Sequence
  Non-cyclic GFR-binding peptide
TRLEPLTILYY

SEQ ID NO: 2174 - protein, 17 aa, Artificial Sequence
  Non-cyclic GFR-binding peptide
  MOD_RES (3), (4): Xaa is C or S
KPXXAPTQLSPISVLFI

SEQ ID NO: 2175 - protein, 18 aa, Artificial Sequence
  Non-cyclic GFR-binding peptide
  MOD_RES (4), (5): Xaa is C or S
ASPXXVSQDLSPISILFI

SEQ ID NO: 2176 - protein, 20 aa, Artificial Sequence
  Non-cyclic GFR-binding peptide
  MOD_RES (6), (7): Xaa is C or S
YVPKPXXAPTKLEPLPVVYY

SEQ ID NO: 2177 - protein, 11 aa, Artificial Sequence
  Non-cyclic GFR-binding peptide
TELSPISMLFI

SEQ ID NO: 2178 - protein, 20 aa, Artificial Sequence
  Non-cyclic GFR-binding peptide
  MOD_RES (6), (7): Xaa is C or S
STPPTXXVPTRLEPLTILYY

SEQ ID NO: 2179 - protein, 12 aa, Artificial Sequence
  Non-cyclic GFR-binding peptide
PTQLEPLPVVYY

SEQ ID NO: 2180 - protein, 18 aa, Artificial Sequence
  Non-cyclic GFR-binding peptide
  MOD_RES (4), (5): Xaa is C or S
PKPXXAPTKLEPLTVLYY

SEQ ID NO: 2181 - protein, 18 aa, Artificial Sequence
  Non-cyclic GFR-binding peptide
  MOD_RES (4), (5): Xaa is C or S
PKAXXVPTELEPLPMVYY

SEQ ID NO: 2182 - protein, 18 aa, Artificial Sequence
  Non-cyclic GFR-binding peptide
  MOD_RES (4), (5): Xaa is C or S
ASPXXVSQDLEPLPIVYY

SEQ ID NO: 2183 - protein, 10 aa, Artificial Sequence
  Non-cyclic GFR-binding peptide
KLSPISVLFI

SEQ ID NO: 2184 - protein, 10 aa, Artificial Sequence
  Non-cyclic GFR-binding peptide
RLSAISILYL

SEQ ID NO: 2185 - protein, 20 aa, Artificial Sequence
  Non-cyclic GFR-binding peptide
  MOD_RES (6), (7): Xaa is C or S
ASAAPXXVPQALSPISILFI

SEQ ID NO: 2186 - protein, 10 aa, Artificial Sequence
  Non-cyclic GFR-binding peptide
ELSPISMLFI

SEQ ID NO: 2187 - protein, 13 aa, Artificial Sequence
  Non-cyclic GFR-binding peptide
VPQALEPLTILYY

SEQ ID NO: 2188 - protein, 17 aa, Artificial Sequence
  Non-cyclic GFR-binding peptide
  MOD_RES (3), (4): Xaa is C or S
PTXXVPTRLEPLPIVYY

SEQ ID NO: 2189 - protein, 13 aa, Artificial Sequence
  Non-cyclic GFR-binding peptide
APTQLEPLTVLYY

SEQ ID NO: 2190 - protein, 18 aa, Artificial Sequence
  Non-cyclic GFR-binding peptide
  MOD_RES (4), (5): Xaa is C or S
PPTXXVPTRLEPLTILYY

SEQ ID NO: 2191 - protein, 12 aa, Artificial Sequence
  Non-cyclic GFR-binding peptide
PTQLEPLTVLYY

SEQ ID NO: 2192 - protein, 18 aa, Artificial Sequence
  Non-cyclic GFR-binding peptide
  MOD_RES (4), (5): Xaa is C or S
PKPXXAPTKLEPLPVVYY

SEQ ID NO: 2193 - protein, 11 aa, Artificial Sequence
  Non-cyclic GFR-binding peptide
TRLSAISILYL

SEQ ID NO: 2194 - protein, 11 aa, Artificial Sequence
  Non-cyclic GFR-binding peptide
TKLSPISVLFI

SEQ ID NO: 2195 - protein, 13 aa, Artificial Sequence
  Non-cyclic GFR-binding peptide
VPTRLEPLTILYY

SEQ ID NO: 2196 - protein, 11 aa, Artificial Sequence
  Non-cyclic GFR-binding peptide
TELEPLPMVYY

SEQ ID NO: 2197 - protein, 20 aa, Artificial Sequence
  Non-cyclic GFR-binding peptide
  MOD_RES (6), (7): Xaa is C or S
ASASPXXVPQDLSPISILFI

SEQ ID NO: 2198 - protein, 17 aa, Artificial Sequence
  Non-cyclic GFR-binding peptide
  MOD_RES (3), (4): Xaa is C or S
KPXXAPTKLSPISVLFI

SEQ ID NO: 2199 - protein, 12 aa, Artificial Sequence
  Non-cyclic GFR-binding peptide
PTRLEPLPIVYY

SEQ ID NO: 2200 - protein, 16 aa, Artificial Sequence
  Non-cyclic GFR-binding peptide
  MOD_RES (2), (3): Xaa is C or S
PXXVPQALEPLTILYY

SEQ ID NO: 2201 - protein, 11 aa, Artificial Sequence
  Non-cyclic GFR-binding peptide
QDLEPLPIVYY

SEQ ID NO: 2202 - protein, 18 aa, Artificial Sequence
  Non-cyclic GFR-binding peptide
  MOD_RES (4), (5): Xaa is C or S
PKAXXVPTELEPLTMLYY

SEQ ID NO: 2203 - protein, 17 aa, Artificial Sequence
  Non-cyclic GFR-binding peptide
  MOD_RES (3), (4): Xaa is C or S
KAXXVPTELSPISMLFI

SEQ ID NO: 2204 - protein, 10 aa, Artificial Sequence
  Non-cyclic GFR-binding peptide
ELEPLTMLYY

SEQ ID NO: 2205 - protein, 17 aa, Artificial Sequence
  Non-cyclic GFR-binding peptide
  MOD_RES (3), (4): Xaa is C or S
APXXVPQALSPISILFI

SEQ ID NO: 2206 - protein, 20 aa, Artificial Sequence
  Non-cyclic GFR-binding peptide
  MOD_RES (6), (7): Xaa is C or S
ASASPXXVPQDLEPLPIVYY

SEQ ID NO: 2207 - protein, 17 aa, Artificial Sequence
  Non-cyclic GFR-binding peptide
  MOD_RES (3), (4): Xaa is C or S
KPXXAPTKLEPLPVVYY

SEQ ID NO: 2208 - protein, 12 aa, Artificial Sequence
  Non-cyclic GFR-binding peptide
SQDLEPLPIVYY

SEQ ID NO: 2209 - protein, 14 aa, Artificial Sequence
  Non-cyclic GFR-binding peptide
  MOD_RES (1), (1): Xaa is C or S
XVPTRLNAISILYF

SEQ ID NO: 2210 - protein, 12 aa, Artificial Sequence
  Non-cyclic GFR-binding peptide
PTRLEPLTILYY

SEQ ID NO: 2211 - protein, 14 aa, Artificial Sequence
  Non-cyclic GFR-binding peptide
  MOD_RES (1), (1): Xaa is C or S
XVPTRLSAISILYL

SEQ ID NO: 2212 - protein, 11 aa, Artificial Sequence
  Non-cyclic GFR-binding peptide
TELEPLTMLYY

SEQ ID NO: 2213 - protein, 19 aa, Artificial Sequence
  Non-cyclic GFR-binding peptide
  MOD_RES (5), (6): Xaa is C or S
TPPTXXVPTRLEPLTILYY

SEQ ID NO: 2214 - protein, 20 aa, Artificial Sequence
  Non-cyclic GFR-binding peptide
  MOD_RES (6), (7): Xaa is C or S
STPPTXXVPTRLEPLPIVYY

SEQ ID NO: 2215 - protein, 11 aa, Artificial Sequence
  Non-cyclic GFR-binding peptide
QDLSPISILFI

SEQ ID NO: 2216 - protein, 18 aa, Artificial Sequence
  Non-cyclic GFR-binding peptide
  MOD_RES (4), (5): Xaa is C or S
PKAXXVPTELSPISMLFI

SEQ ID NO: 2217 - protein, 17 aa, Artificial Sequence
  Non-cyclic GFR-binding peptide
  MOD_RES (3), (4): Xaa is C or S
KAXXVPTELEPLPMVYY

SEQ ID NO: 2218 - protein, 18 aa, Artificial Sequence
  Non-cyclic GFR-binding peptide
  MOD_RES (4), (5): Xaa is C or S
PPTXXVPTRLNAISILYF

SEQ ID NO: 2219 - protein, 11 aa, Artificial Sequence
  Non-cyclic GFR-binding peptide
TKLEPLTVLYY

SEQ ID NO: 2220 - protein, 15 aa, Artificial Sequence
  Non-cyclic GFR-binding peptide
  MOD_RES (1), (2): Xaa is C or S
XXAPTQLEPLPVVYY

SEQ ID NO: 2221 - protein, 17 aa, Artificial Sequence
  Non-cyclic GFR-binding peptide
  MOD_RES (3), (4): Xaa is C or S
KPXXAPTKLEPLTVLYY

SEQ ID NO: 2222 - protein, 19 aa, Artificial Sequence
  Non-cyclic GFR-binding peptide
  MOD_RES (5), (6): Xaa is C or S
SASPXXVSQDLSPISILFI

SEQ ID NO: 2223 - protein, 20 aa, Artificial Sequence
  Non-cyclic GFR-binding peptide
  MOD_RES (6), (7): Xaa is C or S
ASAAPXXVPQALEPLTILYY

SEQ ID NO: 2224 - protein, 10 aa, Artificial Sequence
  Non-cyclic GFR-binding peptide
QLSPISVLFI

SEQ ID NO: 2225 - protein, 14 aa, Artificial Sequence
  Non-cyclic GFR-binding peptide
  MOD_RES (1), (1): Xaa is C or S
XVPQDLEPLPIVYY

SEQ ID NO: 2226 - protein, 15 aa, Artificial Sequence
  Non-cyclic GFR-binding peptide
  MOD_RES (1), (2): Xaa is C or S
XXVPTELSPISMLFI

SEQ ID NO: 2227 - protein, 18 aa, Artificial Sequence
  Non-cyclic GFR-binding peptide
  MOD_RES (4), (5): Xaa is C or S
PKPXXAPTQLEPLTVLYY

SEQ ID NO: 2228 - protein, 20 aa, Artificial Sequence
  Non-cyclic GFR-binding peptide
  MOD_RES (6), (7): Xaa is C or S
TVPKPXXAPTQLEPLPVVYY

SEQ ID NO: 2229 - protein, 16 aa, Artificial Sequence
  Non-cyclic GFR-binding peptide
  MOD_RES (2), (3): Xaa is C or S
PXXAPTQLEPLPVVYY

SEQ ID NO: 2230 - protein, 17 aa, Artificial Sequence
  Non-cyclic GFR-binding peptide
  MOD_RES (3), (4): Xaa is C or S
PTXXVPTRLSAISILYL

SEQ ID NO: 2231 - protein, 19 aa, Artificial Sequence
  Non-cyclic GFR-binding peptide
  MOD_RES (5), (6): Xaa is C or S
TPPTXXVPTRLNAISILYF

SEQ ID NO: 2232 - protein, 18 aa, Artificial Sequence
  Non-cyclic GFR-binding peptide
  MOD_RES (4), (5): Xaa is C or S
AAPXXVPQALEPLTILYY

SEQ ID NO: 2233 - protein, 11 aa, Artificial Sequence
  Non-cyclic GFR-binding peptide
TKLEPLPVVYY

SEQ ID NO: 2234 - protein, 19 aa, Artificial Sequence
  Non-cyclic GFR-binding peptide
  MOD_RES (5), (6): Xaa is C or S
VPKPXXAPTQLEPLPVVYY

SEQ ID NO: 2235 - protein, 20 aa, Artificial Sequence
  Non-cyclic GFR-binding peptide
  MOD_RES (6), (7): Xaa is C or S
STPPTXXVPTRLNAISILYF

SEQ ID NO: 2236 - protein, 15 aa, Artificial Sequence
  Non-cyclic GFR-binding peptide
  MOD_RES (1), (2): Xaa is C or S
XXAPTQLEPLTVLYY

SEQ ID NO: 2237 - protein, 13 aa, Artificial Sequence
  Non-cyclic GFR-binding peptide
VPTRLNAISILYF

SEQ ID NO: 2238 - protein, 17 aa, Artificial Sequence
  Non-cyclic GFR-binding peptide
  MOD_RES (3), (4): Xaa is C or S
SPXXVPQDLSPISILFI

SEQ ID NO: 2239 - protein, 16 aa, Artificial Sequence
  Non-cyclic GFR-binding peptide
  MOD_RES (2), (3): Xaa is C or S
PXXVPQALSPISILFI

SEQ ID NO: 2240 - protein, 18 aa, Artificial Sequence
  Non-cyclic GFR-binding peptide
  MOD_RES (4), (5): Xaa is C or S
ASPXXVPQDLEPLPIVYY

SEQ ID NO: 2241 - protein, 12 aa, Artificial Sequence
  Non-cyclic GFR-binding peptide
PTQLSPISVLFI

SEQ ID NO: 2242 - protein, 15 aa, Artificial Sequence
  Non-cyclic GFR-binding peptide
  MOD_RES (1), (2): Xaa is C or S
XXVPTRLSAISILYL

SEQ ID NO: 2243 - protein, 12 aa, Artificial Sequence
  Non-cyclic GFR-binding peptide
PTKLSPISVLFI

SEQ ID NO: 2244 - protein, 12 aa, Artificial Sequence
  Non-cyclic GFR-binding peptide
PQALEPLTILYY

SEQ ID NO: 2245 - protein, 15 aa, Artificial Sequence
  Non-cyclic GFR-binding peptide
  MOD_RES (1), (2): Xaa is C or S
XXVPTRLNAISILYF

SEQ ID NO: 2246 - protein, 18 aa, Artificial Sequence
  Non-cyclic GFR-binding peptide
  MOD_RES (5), (5): Xaa is C or S
TKPTXAPTKLEPLPVVYY

SEQ ID NO: 2247 - protein, 11 aa, Artificial Sequence
  Non-cyclic GFR-binding peptide
TRLNAISILYF

SEQ ID NO: 2248 - protein, 15 aa, Artificial Sequence
  Non-cyclic GFR-binding peptide
  MOD_RES (1), (2): Xaa is C or S
XXVPQALEPLTILYY

SEQ ID NO: 2249 - protein, 13 aa, Artificial Sequence
  Non-cyclic GFR-binding peptide
APTKLEPLTVLYY

SEQ ID NO: 2250 - protein, 20 aa, Artificial Sequence
  Non-cyclic GFR-binding peptide
  MOD_RES (6), (7): Xaa is C or S
KIPKAXXVPTELEPLPMVYY

SEQ ID NO: 2251 - protein, 10 aa, Artificial Sequence
  Non-cyclic GFR-binding peptide
ALEPLTILYY

SEQ ID NO: 2252 - protein, 14 aa, Artificial Sequence
  Non-cyclic GFR-binding peptide
  MOD_RES (1), (1): Xaa is C or S
XVPQALEPLTILYY

SEQ ID NO: 2253 - protein, 17 aa, Artificial Sequence
  Non-cyclic GFR-binding peptide
  MOD_RES (3), (4): Xaa is C or S
SPXXVSQDLSPISILFI

SEQ ID NO: 2254 - protein, 15 aa, Artificial Sequence
  Non-cyclic GFR-binding peptide
  MOD_RES (1), (2): Xaa is C or S
XXAPTKLEPLTVLYY

SEQ ID NO: 2255 - protein, 20 aa, Artificial Sequence
  Non-cyclic GFR-binding peptide
  MOD_RES (7), (7): Xaa is C or S
HVTKPTXAPTKLEPLTVLYY

SEQ ID NO: 2256 - protein, 12 aa, Artificial Sequence
  Non-cyclic GFR-binding peptide
PQDLEPLPIVYY

SEQ ID NO: 2257 - protein, 14 aa, Artificial Sequence
  Non-cyclic GFR-binding peptide
  MOD_RES (1), (1): Xaa is C or S
XAPTKLEPLPVVYY

SEQ ID NO: 2258 - protein, 16 aa, Artificial Sequence
  Non-cyclic GFR-binding peptide
  MOD_RES (2), (3): Xaa is C or S
TXXVPTRLEPLPIVYY

SEQ ID NO: 2259 - protein, 18 aa, Artificial Sequence
  Non-cyclic GFR-binding peptide
  MOD_RES (4), (5): Xaa is C or S
PKPXXAPTQLEPLPVVYY

SEQ ID NO: 2260 - protein, 16 aa, Artificial Sequence
  Non-cyclic GFR-binding peptide
  MOD_RES (2), (3): Xaa is C or S
PXXAPTQLEPLTVLYY

SEQ ID NO: 2261 - protein, 17 aa, Artificial Sequence
  Non-cyclic GFR-binding peptide
  MOD_RES (3), (4): Xaa is C or S
PTXXVPTRLNAISILYF

SEQ ID NO: 2262 - protein, 19 aa, Artificial Sequence
  Non-cyclic GFR-binding peptide
  MOD_RES (6), (6): Xaa is C or S
VTKPTXAPTKLEPLPVVYY

SEQ ID NO: 2263 - protein, 16 aa, Artificial Sequence
  Non-cyclic GFR-binding peptide
  MOD_RES (2), (3): Xaa is C or S
PXXVSQDLSPISILFI

SEQ ID NO: 2264 - protein, 13 aa, Artificial Sequence
  Non-cyclic GFR-binding peptide
APTQLEPLPVVYY

SEQ ID NO: 2265 - protein, 16 aa, Artificial Sequence
  Non-cyclic GFR-binding peptide
  MOD_RES (2), (3): Xaa is C or S
AXXVPTELEPLPMVYY

SEQ ID NO: 2266 - protein, 12 aa, Artificial Sequence
  Non-cyclic GFR-binding peptide
PTELSPISMLFI

SEQ ID NO: 2267 - protein, 18 aa, Artificial Sequence
  Non-cyclic GFR-binding peptide
  MOD_RES (4), (5): Xaa is C or S
PPTXXVPTRLSAISILYL

SEQ ID NO: 2268 - protein, 14 aa, Artificial Sequence
  Non-cyclic GFR-binding peptide
  MOD_RES (1), (1): Xaa is C or S
XVPTELSPISMLFI

SEQ ID NO: 2269 - protein, 13 aa, Artificial Sequence
  Non-cyclic GFR-binding peptide
VKAVKVSRLQVQT

SEQ ID NO: 2270 - protein, 18 aa, Artificial Sequence
  Non-cyclic GFR-binding peptide
  MOD_RES (16), (16): Xaa is C or S
MIQVTINSLQVQTPRXQV

SEQ ID NO: 2271 - protein, 13 aa, Artificial Sequence
  Non-cyclic GFR-binding peptide
IKRMQVPRQGTPV

SEQ ID NO: 2272 - protein, 11 aa, Artificial Sequence
  Non-cyclic GFR-binding peptide
IKRMQVPREET

SEQ ID NO: 2273 - protein, 14 aa, Artificial Sequence
  Non-cyclic GFR-binding peptide
IKRVQVPRHHVRSP

SEQ ID NO: 2274 - protein, 12 aa, Artificial Sequence
  Non-cyclic GFR-binding peptide
MIQVTINSHHVR

SEQ ID NO: 2275 - protein, 19 aa, Artificial Sequence
  Non-cyclic GFR-binding peptide
  MOD_RES (14), (14): Xaa is C or S
IKRMQVPRQGTPVXELGED

SEQ ID NO: 2276 - protein, 14 aa, Artificial Sequence
  Non-cyclic GFR-binding peptide
  MOD_RES (14), (14): Xaa is C or S
VKAMKVSREETPVX

SEQ ID NO: 2277 - protein, 10 aa, Artificial Sequence
  Non-cyclic GFR-binding peptide
MIQVTINSLQ

SEQ ID NO: 2278 - protein, 15 aa, Artificial Sequence
  Non-cyclic GFR-binding peptide
MIQVTINSLQVQTPR

SEQ ID NO: 2279 - protein, 15 aa, Artificial Sequence
  Non-cyclic GFR-binding peptide
VKAVKVSRLQVQTPR

SEQ ID NO: 2280 - protein, 9 aa, Artificial Sequence
  Non-cyclic GFR-binding peptide
IKRMQVPRQ

SEQ ID NO: 2281 - protein, 20 aa, Artificial Sequence
  Non-cyclic GFR-binding peptide
  MOD_RES (16), (16): Xaa is C or S
MIQVTINSLQVQTPRXQVNR

SEQ ID NO: 2282 - protein, 15 aa, Artificial Sequence
  Non-cyclic GFR-binding peptide
IKRVQVPRHHVRSPQ

SEQ ID NO: 2283 - protein, 14 aa, Artificial Sequence
  Non-cyclic GFR-binding peptide
  MOD_RES (14), (14): Xaa is C or S
IKRMQVPRQGTPVX

SEQ ID NO: 2284 - protein, 16 aa, Artificial Sequence
  Non-cyclic GFR-binding peptide
  MOD_RES (14), (14): Xaa is C or S
VKAMKVSRQGTPVXEL

SEQ ID NO: 2285 - protein, 19 aa, Artificial Sequence
  Non-cyclic GFR-binding peptide
  MOD_RES (16), (16): Xaa is C or S
IKRVQVPRHHVRSPQXKVS

SEQ ID NO: 2286 - protein, 11 aa, Artificial Sequence
  Non-cyclic GFR-binding peptide
VKAMKVSRQGT

SEQ ID NO: 2287 - protein, 17 aa, Artificial Sequence
  Non-cyclic GFR-binding peptide
  MOD_RES (14), (14): Xaa is C or S
IKRMQVPREETPVXELG

SEQ ID NO: 2288 - protein, 20 aa, Artificial Sequence
  Non-cyclic GFR-binding peptide
  MOD_RES (16), (16): Xaa is C or S
VKAVKVSRLQVQTPRXQVNR

SEQ ID NO: 2289 - protein, 19 aa, Artificial Sequence
  Non-cyclic GFR-binding peptide
  MOD_RES (14), (14): Xaa is C or S
VKAMKVSREETPVXELGED

SEQ ID NO: 2290 - protein, 13 aa, Artificial Sequence
  Non-cyclic GFR-binding peptide
MIQVTINSLQVQT

SEQ ID NO: 2291 - protein, 13 aa, Artificial Sequence
  Non-cyclic GFR-binding peptide
VKAMKVSREETPV

SEQ ID NO: 2292 - protein, 11 aa, Artificial Sequence
  Non-cyclic GFR-binding peptide
MIQVTINSLQV

SEQ ID NO: 2293 - protein, 20 aa, Artificial Sequence
  Non-cyclic GFR-binding peptide
  MOD_RES (14), (14): Xaa is C or S
VKAMKVSREETPVXELGEDN

SEQ ID NO: 2294 - protein, 16 aa, Artificial Sequence
  Non-cyclic GFR-binding peptide
  MOD_RES (14), (14): Xaa is C or S
IKRMQVPREETPVXEL

SEQ ID NO: 2295 - protein, 17 aa, Artificial Sequence
  Non-cyclic GFR-binding peptide
  MOD_RES (16), (16): Xaa is C or S
MIQVTINSHHVRSPQXK

SEQ ID NO: 2296 - protein, 18 aa, Artificial Sequence
  Non-cyclic GFR-binding peptide
  MOD_RES (16), (16): Xaa is C or S
VKAVKVSRLQVQTPRXQV

SEQ ID NO: 2297 - protein, 16 aa, Artificial Sequence
  Non-cyclic GFR-binding peptide
  MOD_RES (16), (16): Xaa is C or S
MIQVTINSLQVQTPRX

SEQ ID NO: 2298 - protein, 14 aa, Artificial Sequence
  Non-cyclic GFR-binding peptide
MIQVTINSHHVRSP

SEQ ID NO: 2299 - protein, 12 aa, Artificial Sequence
  Non-cyclic GFR-binding peptide
IKRVQVPRHHVR

SEQ ID NO: 2300 - protein, 10 aa, Artificial Sequence
  Non-cyclic GFR-binding peptide
IKRVQVPRHH

SEQ ID NO: 2301 - protein, 15 aa, Artificial Sequence
  Non-cyclic GFR-binding peptide
  MOD_RES (14), (14): Xaa is C or S
VKAMKVSRQGTPVXE

SEQ ID NO: 2302 - protein, 10 aa, Artificial Sequence
  Non-cyclic GFR-binding peptide
VKAMKVSRQG

SEQ ID NO: 2303 - protein, 12 aa, Artificial Sequence
  Non-cyclic GFR-binding peptide
IKRMQVPREETP

SEQ ID NO: 2304 - protein, 20 aa, Artificial Sequence
  Non-cyclic GFR-binding peptide
  MOD_RES (16), (16): Xaa is C or S
IKRVQVPRHHVRSPQXKVSS

SEQ ID NO: 2305 - protein, 15 aa, Artificial Sequence
  Non-cyclic GFR-binding peptide
  MOD_RES (14), (14): Xaa is C or S
VKAMKVSREETPVXE

SEQ ID NO: 2306 - protein, 10 aa, Artificial Sequence
  Non-cyclic GFR-binding peptide
VKAMKVSREE

SEQ ID NO: 2307 - protein, 19 aa, Artificial Sequence
  Non-cyclic GFR-binding peptide
  MOD_RES (14), (14): Xaa is C or S
VKAMKVSRQGTPVXELGED

SEQ ID NO: 2308 - protein, 14 aa, Artificial Sequence
  Non-cyclic GFR-binding peptide
  MOD_RES (14), (14): Xaa is C or S
IKRMQVPREETPVX

SEQ ID NO: 2309 - protein, 13 aa, Artificial Sequence
  Non-cyclic GFR-binding peptide
MIQVTINSHHVRS

SEQ ID NO: 2310 - protein, 15 aa, Artificial Sequence
  Non-cyclic GFR-binding peptide
MIQVTINSHHVRSPQ

SEQ ID NO: 2311 - protein, 12 aa, Artificial Sequence
  Non-cyclic GFR-binding peptide
VKAVKVSRLQVQ

SEQ ID NO: 2312 - protein, 9 aa, Artificial Sequence
  Non-cyclic GFR-binding peptide
VKAMKVSRQ

SEQ ID NO: 2313 - protein, 9 aa, Artificial Sequence
  Non-cyclic GFR-binding peptide
VKAVKVSRL

SEQ ID NO: 2314 - protein, 10 aa, Artificial Sequence
  Non-cyclic GFR-binding peptide
VKAVKVSRLQ

SEQ ID NO: 2315 - protein, 20 aa, Artificial Sequence
  Non-cyclic GFR-binding peptide
  MOD_RES (16), (16): Xaa is C or S
MIQVTINSHHVRSPQXKVSS

SEQ ID NO: 2316 - protein, 19 aa, Artificial Sequence
  Non-cyclic GFR-binding peptide
  MOD_RES (16), (16): Xaa is C or S
VKAVKVSRLQVQTPRXQVN

SEQ ID NO: 2317 - protein, 14 aa, Artificial Sequence
  Non-cyclic GFR-binding peptide
  MOD_RES (14), (14): Xaa is C or S
VKAMKVSRQGTPVX

SEQ ID NO: 2318 - protein, 19 aa, Artificial Sequence
  Non-cyclic GFR-binding peptide
  MOD_RES (14), (14): Xaa is C or S
IKRMQVPREETPVXELGED

SEQ ID NO: 2319 - protein, 11 aa, Artificial Sequence
  Non-cyclic GFR-binding peptide
MIQVTINSHHV

SEQ ID NO: 2320 - protein, 11 aa, Artificial Sequence
  Non-cyclic GFR-binding peptide
IKRMQVPRQGT

SEQ ID NO: 2321 - protein, 16 aa, Artificial Sequence
  Non-cyclic GFR-binding peptide
  MOD_RES (14), (14): Xaa is C or S
IKRMQVPRQGTPVXEL

SEQ ID NO: 2322 - protein, 18 aa, Artificial Sequence
  Non-cyclic GFR-binding peptide
  MOD_RES (16), (16): Xaa is C or S
MIQVTINSHHVRSPQXKV

SEQ ID NO: 2323 - protein, 13 aa, Artificial Sequence
  Non-cyclic GFR-binding peptide
IKRMQVPREETPV

SEQ ID NO: 2324 - protein, 14 aa, Artificial Sequence
  Non-cyclic GFR-binding peptide
MIQVTINSLQVQTP

SEQ ID NO: 2325 - protein, 10 aa, Artificial Sequence
  Non-cyclic GFR-binding peptide
MIQVTINSHH

SEQ ID NO: 2326 - protein, 13 aa, Artificial Sequence
  Non-cyclic GFR-binding peptide
VKAMKVSRQGTPV

SEQ ID NO: 2327 - protein, 18 aa, Artificial Sequence
  Non-cyclic GFR-binding peptide
  MOD_RES (14), (14): Xaa is C or S
VKAMKVSRQGTPVXELGE

SEQ ID NO: 2328 - protein, 16 aa, Artificial Sequence
  Non-cyclic GFR-binding peptide
  MOD_RES (16), (16): Xaa is C or S
VKAVKVSRLQVQTPRX

SEQ ID NO: 2329 - protein, 14 aa, Artificial Sequence
  Non-cyclic GFR-binding peptide
VKAVKVSRLQVQTP

SEQ ID NO: 2330 - protein, 13 aa, Artificial Sequence
  Non-cyclic GFR-binding peptide
IKRVQVPRHHVRS

SEQ ID NO: 2331 - protein, 12 aa, Artificial Sequence
  Non-cyclic GFR-binding peptide
IKRMQVPRQGTP

SEQ ID NO: 2332 - protein, 20 aa, Artificial Sequence
  Non-cyclic GFR-binding peptide
  MOD_RES (14), (14): Xaa is C or S
VKAMKVSRQGTPVXELGEDN

SEQ ID NO: 2333 - protein, 17 aa, Artificial Sequence
  Non-cyclic GFR-binding peptide
  MOD_RES (16), (16): Xaa is C or S
MIQVTINSLQVQTPRXQ

SEQ ID NO: 2334 - protein, 17 aa, Artificial Sequence
  Non-cyclic GFR-binding peptide
  MOD_RES (14), (14): Xaa is C or S
VKAMKVSRQGTPVXELG

SEQ ID NO: 2335 - protein, 11 aa, Artificial Sequence
  Non-cyclic GFR-binding peptide
VKAMKVSREET

SEQ ID NO: 2336 - protein, 18 aa, Artificial Sequence
  Non-cyclic GFR-binding peptide
  MOD_RES (14), (14): Xaa is C or S
IKRMQVPREETPVXELGE

SEQ ID NO: 2337 - protein, 11 aa, Artificial Sequence
  Non-cyclic GFR-binding peptide
IKRVQVPRHHV

SEQ ID NO: 2338 - protein, 9 aa, Artificial Sequence
  Non-cyclic GFR-binding peptide
VKAMKVSRE

SEQ ID NO: 2339 - protein, 18 aa, Artificial Sequence
  Non-cyclic GFR-binding peptide
  MOD_RES (16), (16): Xaa is C or S
IKRVQVPRHHVRSPQXKV

SEQ ID NO: 2340 - protein, 18 aa, Artificial Sequence
  Non-cyclic GFR-binding peptide
  MOD_RES (14), (14): Xaa is C or S
IKRMQVPRQGTPVXELGE

SEQ ID NO: 2341 - protein, 17 aa, Artificial Sequence
  Non-cyclic GFR-binding peptide
  MOD_RES (16), (16): Xaa is C or S
VKAVKVSRLQVQTPRXQ

SEQ ID NO: 2342 - protein, 20 aa, Artificial Sequence
  Non-cyclic GFR-binding peptide
  MOD_RES (14), (14): Xaa is C or S
IKRMQVPRQGTPVXELGEDN

SEQ ID NO: 2343 - protein, 11 aa, Artificial Sequence
  Non-cyclic GFR-binding peptide
VKAVKVSRLQV

SEQ ID NO: 2344 - protein, 12 aa, Artificial Sequence
  Non-cyclic GFR-binding peptide
VKAMKVSREETP

SEQ ID NO: 2345 - protein, 17 aa, Artificial Sequence
  Non-cyclic GFR-binding peptide
  MOD_RES (16), (16): Xaa is C or S
IKRVQVPRHHVRSPQXK

SEQ ID NO: 2346 - protein, 15 aa, Artificial Sequence
  Non-cyclic GFR-binding peptide
  MOD_RES (14), (14): Xaa is C or S
IKRMQVPRQGTPVXE

SEQ ID NO: 2347 - protein, 10 aa, Artificial Sequence
  Non-cyclic GFR-binding peptide
IKRMQVPRQG

SEQ ID NO: 2348 - protein, 17 aa, Artificial Sequence
  Non-cyclic GFR-binding peptide
  MOD_RES (14), (14): Xaa is C or S
VKAMKVSREETPVXELG

SEQ ID NO: 2349 - protein, 20 aa, Artificial Sequence
  Non-cyclic GFR-binding peptide
  MOD_RES (14), (14): Xaa is C or S
IKRMQVPREETPVXELGEDN

SEQ ID NO: 2350 - protein, 17 aa, Artificial Sequence
  Non-cyclic GFR-binding peptide
  MOD_RES (14), (14): Xaa is C or S
IKRMQVPRQGTPVXELG

SEQ ID NO: 2351 - protein, 9 aa, Artificial Sequence
  Non-cyclic GFR-binding peptide
IKRMQVPRE

SEQ ID NO: 2352 - protein, 19 aa, Artificial Sequence
  Non-cyclic GFR-binding peptide
  MOD_RES (16), (16): Xaa is C or S
MIQVTINSHHVRSPQXKVS

SEQ ID NO: 2353 - protein, 9 aa, Artificial Sequence
  Non-cyclic GFR-binding peptide
MIQVTINSL

SEQ ID NO: 2354 - protein, 16 aa, Artificial Sequence
  Non-cyclic GFR-binding peptide
  MOD_RES (14), (14): Xaa is C or S
VKAMKVSREETPVXEL

SEQ ID NO: 2355 - protein, 18 aa, Artificial Sequence
  Non-cyclic GFR-binding peptide
  MOD_RES (14), (14): Xaa is C or S
VKAMKVSREETPVXELGE

SEQ ID NO: 2356 - protein, 16 aa, Artificial Sequence
  Non-cyclic GFR-binding peptide
  MOD_RES (16), (16): Xaa is C or S
IKRVQVPRHHVRSPQX

SEQ ID NO: 2357 - protein, 19 aa, Artificial Sequence
  Non-cyclic GFR-binding peptide
  MOD_RES (16), (16): Xaa is C or S
MIQVTINSLQVQTPRXQVN

SEQ ID NO: 2358 - protein, 9 aa, Artificial Sequence
  Non-cyclic GFR-binding peptide
IKRVQVPRH

SEQ ID NO: 2359 - protein, 16 aa, Artificial Sequence
  Non-cyclic GFR-binding peptide
  MOD_RES (16), (16): Xaa is C or S
MIQVTINSHHVRSPQX

SEQ ID NO: 2360 - protein, 9 aa, Artificial Sequence
  Non-cyclic GFR-binding peptide
MIQVTINSH

SEQ ID NO: 2361 - protein, 15 aa, Artificial Sequence
  Non-cyclic GFR-binding peptide
  MOD_RES (14), (14): Xaa is C or S
IKRMQVPREETPVXE

SEQ ID NO: 2362 - protein, 10 aa, Artificial Sequence
  Non-cyclic GFR-binding peptide
IKRMQVPREE

SEQ ID NO: 2363 - protein, 12 aa, Artificial Sequence
  Non-cyclic GFR-binding peptide
VKAMKVSRQGTP

SEQ ID NO: 2364 - protein, 12 aa, Artificial Sequence
  Non-cyclic GFR-binding peptide
MIQVTINSLQVQ

SEQ ID NO: 2365 - protein, 13 aa, Artificial Sequence
  Non-cyclic GFR-binding peptide
TQVQLRSVKVAKV

SEQ ID NO: 2366 - protein, 18 aa, Artificial Sequence
  Non-cyclic GFR-binding peptide
  MOD_RES (3), (3): Xaa is C or S
VQXRPTQVQLSNITVQIM

SEQ ID NO: 2367 - protein, 13 aa, Artificial Sequence
  Non-cyclic GFR-binding peptide
VPTGQRPVQMRKI

SEQ ID NO: 2368 - protein, 11 aa, Artificial Sequence
  Non-cyclic GFR-binding peptide
TEERPVQMRKI

SEQ ID NO: 2369 - protein, 14 aa, Artificial Sequence
  Non-cyclic GFR-binding peptide
PSRVHHRPVQVRKI

SEQ ID NO: 2370 - protein, 12 aa, Artificial Sequence
  Non-cyclic GFR-binding peptide
RVHHSNITVQIM

SEQ ID NO: 2371 - protein, 19 aa, Artificial Sequence
  Non-cyclic GFR-binding peptide
  MOD_RES (6), (6): Xaa is C or S
DEGLEXVPTGQRPVQMRKI

SEQ ID NO: 2372 - protein, 14 aa, Artificial Sequence
  Non-cyclic GFR-binding peptide
  MOD_RES (1), (1): Xaa is C or S
XVPTEERSVKMAKV

SEQ ID NO: 2373 - protein, 10 aa, Artificial Sequence
  Non-cyclic GFR-binding peptide
QLSNITVQIM

SEQ ID NO: 2374 - protein, 15 aa, Artificial Sequence
  Non-cyclic GFR-binding peptide
RPTQVQLSNITVQIM

SEQ ID NO: 2375 - protein, 15 aa, Artificial Sequence
  Non-cyclic GFR-binding peptide
RPTQVQLRSVKVAKV

SEQ ID NO: 2376 - protein, 9 aa, Artificial Sequence
  Non-cyclic GFR-binding peptide
QRPVQMRKI

SEQ ID NO: 2377 - protein, 20 aa, Artificial Sequence
  Non-cyclic GFR-binding peptide
  MOD_RES (5), (5): Xaa is C or S
RNVQXRPTQVQLSNITVQIM

SEQ ID NO: 2378 - protein, 15 aa, Artificial Sequence
  Non-cyclic GFR-binding peptide
QPSRVHHRPVQVRKI

SEQ ID NO: 2379 - protein, 14 aa, Artificial Sequence
  Non-cyclic GFR-binding peptide
  MOD_RES (1), (1): Xaa is C or S
XVPTGQRPVQMRKI

SEQ ID NO: 2380 - protein, 16 aa, Artificial Sequence
  Non-cyclic GFR-binding peptide
  MOD_RES (3), (3): Xaa is C or S
LEXVPTGQRSVKMAKV

SEQ ID NO: 2381 - protein, 19 aa, Artificial Sequence
  Non-cyclic GFR-binding peptide
  MOD_RES (4), (4): Xaa is C or S
SVKXQPSRVHHRPVQVRKI

SEQ ID NO: 2382 - protein, 11 aa, Artificial Sequence
  Non-cyclic GFR-binding peptide
TGQRSVKMAKV

SEQ ID NO: 2383 - protein, 17 aa, Artificial Sequence
  Non-cyclic GFR-binding peptide
  MOD_RES (4), (4): Xaa is C or S
GLEXVPTEERPVQMRKI

SEQ ID NO: 2384 - protein, 20 aa, Artificial Sequence
  Non-cyclic GFR-binding peptide
  MOD_RES (5), (5): Xaa is C or S
RNVQXRPTQVQLRSVKVAKV

SEQ ID NO: 2385 - protein, 19 aa, Artificial Sequence
  Non-cyclic GFR-binding peptide
  MOD_RES (6), (6): Xaa is C or S
DEGLEXVPTEERSVKMAKV

SEQ ID NO: 2386 - protein, 13 aa, Artificial Sequence
  Non-cyclic GFR-binding peptide
TQVQLSNITVQIM

SEQ ID NO: 2387 - protein, 13 aa, Artificial Sequence
  Non-cyclic GFR-binding peptide
VPTEERSVKMAKV

SEQ ID NO: 2388 - protein, 11 aa, Artificial Sequence
  Non-cyclic GFR-binding peptide
VQLSNITVQIM

SEQ ID NO: 2389 - protein, 20 aa, Artificial Sequence
  Non-cyclic GFR-binding peptide
  MOD_RES (7), (7): Xaa is C or S
NDEGLEXVPTEERSVKMAKV

SEQ ID NO: 2390 - protein, 16 aa, Artificial Sequence
  Non-cyclic GFR-binding peptide
  MOD_RES (3), (3): Xaa is C or S
LEXVPTEERPVQMRKI

SEQ ID NO: 2391 - protein, 17 aa, Artificial Sequence
  Non-cyclic GFR-binding peptide
  MOD_RES (2), (2): Xaa is C or S
KXQPSRVHHSNITVQIM

SEQ ID NO: 2392 - protein, 18 aa, Artificial Sequence
  Non-cyclic GFR-binding peptide
  MOD_RES (3), (3): Xaa is C or S
VQXRPTQVQLRSVKVAKV

SEQ ID NO: 2393 - protein, 16 aa, Artificial Sequence
  Non-cyclic GFR-binding peptide
  MOD_RES (1), (1): Xaa is C or S
XRPTQVQLSNITVQIM

SEQ ID NO: 2394 - protein, 14 aa, Artificial Sequence
  Non-cyclic GFR-binding peptide
PSRVHHSNITVQIM

SEQ ID NO: 2395 - protein, 12 aa, Artificial Sequence
  Non-cyclic GFR-binding peptide
RVHHRPVQVRKI

SEQ ID NO: 2396 - protein, 10 aa, Artificial Sequence
  Non-cyclic GFR-binding peptide
HHRPVQVRKI

SEQ ID NO: 2397 - protein, 15 aa, Artificial Sequence
  Non-cyclic GFR-binding peptide
  MOD_RES (2), (2): Xaa is C or S
EXVPTGQRSVKMAKV

SEQ ID NO: 2398 - protein, 10 aa, Artificial Sequence
  Non-cyclic GFR-binding peptide
GQRSVKMAKV

SEQ ID NO: 2399 - protein, 12 aa, Artificial Sequence
  Non-cyclic GFR-binding peptide
PTEERPVQMRKI

SEQ ID NO: 2400 - protein, 20 aa, Artificial Sequence
  Non-cyclic GFR-binding peptide
  MOD_RES (5), (5): Xaa is C or S
SSVKXQPSRVHHRPVQVRKI

SEQ ID NO: 2401 - protein, 15 aa, Artificial Sequence
  Non-cyclic GFR-binding peptide
  MOD_RES (2), (2): Xaa is C or S
EXVPTEERSVKMAKV

SEQ ID NO: 2402 - protein, 10 aa, Artificial Sequence
  Non-cyclic GFR-binding peptide
EERSVKMAKV

SEQ ID NO: 2403 - protein, 19 aa, Artificial Sequence
  Non-cyclic GFR-binding peptide
  MOD_RES (6), (6): Xaa is C or S
DEGLEXVPTGQRSVKMAKV

SEQ ID NO: 2404 - protein, 14 aa, Artificial Sequence
  Non-cyclic GFR-binding peptide
  MOD_RES (1), (1): Xaa is C or S
XVPTEERPVQMRKI

SEQ ID NO: 2405 - protein, 13 aa, Artificial Sequence
  Non-cyclic GFR-binding peptide
SRVHHSNITVQIM

SEQ ID NO: 2406 - protein, 15 aa, Artificial Sequence
  Non-cyclic GFR-binding peptide
QPSRVHHSNITVQIM

SEQ ID NO: 2407 - protein, 12 aa, Artificial Sequence
  Non-cyclic GFR-binding peptide
QVQLRSVKVAKV

SEQ ID NO: 2408 - protein, 9 aa, Artificial Sequence
  Non-cyclic GFR-binding peptide
QRSVKMAKV

SEQ ID NO: 2409 - protein, 9 aa, Artificial Sequence
  Non-cyclic GFR-binding peptide
LRSVKVAKV

SEQ ID NO: 2410 - protein, 10 aa, Artificial Sequence
  Non-cyclic GFR-binding peptide
QLRSVKVAKV

SEQ ID NO: 2411 - protein, 20 aa, Artificial Sequence
  Non-cyclic GFR-binding peptide
  MOD_RES (5), (5): Xaa is C or S
SSVKXQPSRVHHSNITVQIM

SEQ ID NO: 2412 - protein, 19 aa, Artificial Sequence
  Non-cyclic GFR-binding peptide
  MOD_RES (4), (4): Xaa is C or S
NVQXRPTQVQLRSVKVAKV

SEQ ID NO: 2413 - protein, 14 aa, Artificial Sequence
  Non-cyclic GFR-binding peptide
  MOD_RES (1), (1): Xaa is C or S
XVPTGQRSVKMAKV

SEQ ID NO: 2414 - protein, 19 aa, Artificial Sequence
  Non-cyclic GFR-binding peptide
  MOD_RES (6), (6): Xaa is C or S
DEGLEXVPTEERPVQMRKI

SEQ ID NO: 2415 - protein, 11 aa, Artificial Sequence
  Non-cyclic GFR-binding peptide
VHHSNITVQIM

SEQ ID NO: 2416 - protein, 11 aa, Artificial Sequence
  Non-cyclic GFR-binding peptide
TGQRPVQMRKI

SEQ ID NO: 2417 - protein, 16 aa, Artificial Sequence
  Non-cyclic GFR-binding peptide
  MOD_RES (3), (3): Xaa is C or S
LEXVPTGQRPVQMRKI

SEQ ID NO: 2418 - protein, 18 aa, Artificial Sequence
  Non-cyclic GFR-binding peptide
  MOD_RES (3), (3): Xaa is C or S
VKXQPSRVHHSNITVQIM

SEQ ID NO: 2419 - protein, 13 aa, Artificial Sequence
  Non-cyclic GFR-binding peptide
VPTEERPVQMRKI

SEQ ID NO: 2420 - protein, 14 aa, Artificial Sequence
  Non-cyclic GFR-binding peptide
PTQVQLSNITVQIM

SEQ ID NO: 2421 - protein, 10 aa, Artificial Sequence
  Non-cyclic GFR-binding peptide
HHSNITVQIM

SEQ ID NO: 2422 - protein, 13 aa, Artificial Sequence
  Non-cyclic GFR-binding peptide
VPTGQRSVKMAKV

SEQ ID NO: 2423 - protein, 18 aa, Artificial Sequence
  Non-cyclic GFR-binding peptide
  MOD_RES (5), (5): Xaa is C or S
EGLEXVPTGQRSVKMAKV

SEQ ID NO: 2424 - protein, 16 aa, Artificial Sequence
  Non-cyclic GFR-binding peptide
  MOD_RES (1), (1): Xaa is C or S
XRPTQVQLRSVKVAKV

SEQ ID NO: 2425 - protein, 14 aa, Artificial Sequence
  Non-cyclic GFR-binding peptide
PTQVQLRSVKVAKV

SEQ ID NO: 2426 - protein, 13 aa, Artificial Sequence
  Non-cyclic GFR-binding peptide
SRVHHRPVQVRKI

SEQ ID NO: 2427 - protein, 12 aa, Artificial Sequence
  Non-cyclic GFR-binding peptide
PTGQRPVQMRKI

SEQ ID NO: 2428 - protein, 20 aa, Artificial Sequence
  Non-cyclic GFR-binding peptide
  MOD_RES (7), (7): Xaa is C or S
NDEGLEXVPTGQRSVKMAKV

SEQ ID NO: 2429 - protein, 17 aa, Artificial Sequence
  Non-cyclic GFR-binding peptide
  MOD_RES (2), (2): Xaa is C or S
QXRPTQVQLSNITVQIM

SEQ ID NO: 2430 - protein, 17 aa, Artificial Sequence
  Non-cyclic GFR-binding peptide
  MOD_RES (4), (4): Xaa is C or S
GLEXVPTGQRSVKMAKV

SEQ ID NO: 2431 - protein, 11 aa, Artificial Sequence
  Non-cyclic GFR-binding peptide
TEERSVKMAKV

SEQ ID NO: 2432 - protein, 18 aa, Artificial Sequence
  Non-cyclic GFR-binding peptide
  MOD_RES (5), (5): Xaa is C or S
EGLEXVPTEERPVQMRKI

SEQ ID NO: 2433 - protein, 11 aa, Artificial Sequence
  Non-cyclic GFR-binding peptide
VHHRPVQVRKI

SEQ ID NO: 2434 - protein, 9 aa, Artificial Sequence
  Non-cyclic GFR-binding peptide
ERSVKMAKV

SEQ ID NO: 2435 - protein, 18 aa, Artificial Sequence
  Non-cyclic GFR-binding peptide
  MOD_RES (3), (3): Xaa is C or S
VKXQPSRVHHRPVQVRKI

SEQ ID NO: 2436 - protein, 18 aa, Artificial Sequence
  Non-cyclic GFR-binding peptide
  MOD_RES (5), (5): Xaa is C or S
EGLEXVPTGQRPVQMRKI

SEQ ID NO: 2437 - protein, 17 aa, Artificial Sequence
  Non-cyclic GFR-binding peptide
  MOD_RES (2), (2): Xaa is C or S
QXRPTQVQLRSVKVAKV

SEQ ID NO: 2438 - protein, 20 aa, Artificial Sequence
  Non-cyclic GFR-binding peptide
  MOD_RES (7), (7): Xaa is C or S
NDEGLEXVPTGQRPVQMRKI

SEQ ID NO: 2439 - protein, 11 aa, Artificial Sequence
  Non-cyclic GFR-binding peptide
VQLRSVKVAKV

SEQ ID NO: 2440 - protein, 12 aa, Artificial Sequence
  Non-cyclic GFR-binding peptide
PTEERSVKMAKV

SEQ ID NO: 2441 - protein, 17 aa, Artificial Sequence
  Non-cyclic GFR-binding peptide
  MOD_RES (2), (2): Xaa is C or S
KXQPSRVHHRPVQVRKI

SEQ ID NO: 2442 - protein, 15 aa, Artificial Sequence
  Non-cyclic GFR-binding peptide
  MOD_RES (2), (2): Xaa is C or S
EXVPTGQRPVQMRKI

SEQ ID NO: 2443 - protein, 10 aa, Artificial Sequence
  Non-cyclic GFR-binding peptide
GQRPVQMRKI

SEQ ID NO: 2444 - protein, 17 aa, Artificial Sequence
  Non-cyclic GFR-binding peptide
  MOD_RES (4), (4): Xaa is C or S
GLEXVPTEERSVKMAKV

SEQ ID NO: 2445 - protein, 20 aa, Artificial Sequence
  Non-cyclic GFR-binding peptide
  MOD_RES (7), (7): Xaa is C or S
NDEGLEXVPTEERPVQMRKI

SEQ ID NO: 2446 - protein, 17 aa, Artificial Sequence
  Non-cyclic GFR-binding peptide
  MOD_RES (4), (4): Xaa is C or S
GLEXVPTGQRPVQMRKI

SEQ ID NO: 2447 - protein, 9 aa, Artificial Sequence
  Non-cyclic GFR-binding peptide
ERPVQMRKI

SEQ ID NO: 2448 - protein, 19 aa, Artificial Sequence
  Non-cyclic GFR-binding peptide
  MOD_RES (4), (4): Xaa is C or S
SVKXQPSRVHHSNITVQIM

SEQ ID NO: 2449 - protein, 9 aa, Artificial Sequence
  Non-cyclic GFR-binding peptide
LSNITVQIM

SEQ ID NO: 2450 - protein, 16 aa, Artificial Sequence
  Non-cyclic GFR-binding peptide
  MOD_RES (3), (3): Xaa is C or S
LEXVPTEERSVKMAKV

SEQ ID NO: 2451 - protein, 18 aa, Artificial Sequence
  Non-cyclic GFR-binding peptide
  MOD_RES (5), (5): Xaa is C or S
EGLEXVPTEERSVKMAKV

SEQ ID NO: 2452 - protein, 16 aa, Artificial Sequence
  Non-cyclic GFR-binding peptide
  MOD_RES (1), (1): Xaa is C or S
XQPSRVHHRPVQVRKI

SEQ ID NO: 2453 - protein, 19 aa, Artificial Sequence
  Non-cyclic GFR-binding peptide
  MOD_RES (4), (4): Xaa is C or S
NVQXRPTQVQLSNITVQIM

SEQ ID NO: 2454 - protein, 9 aa, Artificial Sequence
  Non-cyclic GFR-binding peptide
HRPVQVRKI

SEQ ID NO: 2455 - protein, 16 aa, Artificial Sequence
  Non-cyclic GFR-binding peptide
  MOD_RES (1), (1): Xaa is C or S
XQPSRVHHSNITVQIM

SEQ ID NO: 2456 - protein, 9 aa, Artificial Sequence
  Non-cyclic GFR-binding peptide
HSNITVQIM

SEQ ID NO: 2457 - protein, 15 aa, Artificial Sequence
  Non-cyclic GFR-binding peptide
  MOD_RES (2), (2): Xaa is C or S
EXVPTEERPVQMRKI

SEQ ID NO: 2458 - protein, 10 aa, Artificial Sequence
  Non-cyclic GFR-binding peptide
EERPVQMRKI

SEQ ID NO: 2459 - protein, 12 aa, Artificial Sequence
  Non-cyclic GFR-binding peptide
PTGQRSVKMAKV

SEQ ID NO: 2460 - protein, 12 aa, Artificial Sequence
  Non-cyclic GFR-binding peptide
QVQLSNITVQIM

SEQ ID NO: 2461 - protein, 10 aa, Artificial Sequence
  Non-cyclic GFR-binding peptide
IYLMSIPSLE

SEQ ID NO: 2462 - protein, 18 aa, Artificial Sequence
  Non-cyclic GFR-binding peptide
  MOD_RES (14), (15): Xaa is C or S
IYLISIPSLDQSVXXPSA

SEQ ID NO: 2463 - protein, 13 aa, Artificial Sequence
  Non-cyclic GFR-binding peptide
LYLISIPELDQPV

SEQ ID NO: 2464 - protein, 14 aa, Artificial Sequence
  Non-cyclic GFR-binding peptide
  MOD_RES (14), (14): Xaa is C or S
FYLISIANLKTPVX

SEQ ID NO: 2465 - protein, 13 aa, Artificial Sequence
  Non-cyclic GFR-binding peptide
LYLMSIPELETPV

SEQ ID NO: 2466 - protein, 15 aa, Artificial Sequence
  Non-cyclic GFR-binding peptide
  MOD_RES (14), (15): Xaa is C or S
LYLVSIPELKTPAXX

SEQ ID NO: 2467 - protein, 19 aa, Artificial Sequence
  Non-cyclic GFR-binding peptide
  MOD_RES (14), (15): Xaa is C or S
KYLISIPSLRAPVXXSAPA

SEQ ID NO: 2468 - protein, 14 aa, Artificial Sequence
  Non-cyclic GFR-binding peptide
  MOD_RES (14), (14): Xaa is C or S
LYLISIPELDQSVX

SEQ ID NO: 2469 - protein, 16 aa, Artificial Sequence
  Non-cyclic GFR-binding peptide
  MOD_RES (14), (14): Xaa is C or S
LYLVSIPELKTPAXTP

SEQ ID NO: 2470 - protein, 19 aa, Artificial Sequence
  Non-cyclic GFR-binding peptide
  MOD_RES (14), (15): Xaa is C or S
LYLVSIPELKTPAXXPKPV

SEQ ID NO: 2471 - protein, 10 aa, Artificial Sequence
  Non-cyclic GFR-binding peptide
LYLISIPELD

SEQ ID NO: 2472 - protein, 17 aa, Artificial Sequence
  Non-cyclic GFR-binding peptide
  MOD_RES (14), (15): Xaa is C or S
LYLISIPELRAPVXXSA

SEQ ID NO: 2473 - protein, 12 aa, Artificial Sequence
  Non-cyclic GFR-binding peptide
IYLISIPSLAQP

SEQ ID NO: 2474 - protein, 12 aa, Artificial Sequence
  Non-cyclic GFR-binding peptide
FYLISIANLRAP

SEQ ID NO: 2475 - protein, 18 aa, Artificial Sequence
  Non-cyclic GFR-binding peptide
  MOD_RES (14), (15): Xaa is C or S
IYLMSIPSLETPVXXAKP

SEQ ID NO: 2476 - protein, 14 aa, Artificial Sequence
  Non-cyclic GFR-binding peptide
  MOD_RES (14), (14): Xaa is C or S
IYLISIPSLKTPVX

SEQ ID NO: 2477 - protein, 14 aa, Artificial Sequence
  Non-cyclic GFR-binding peptide
  MOD_RES (14), (14): Xaa is C or S
KYLISIPSLKTPVX

SEQ ID NO: 2478 - protein, 19 aa, Artificial Sequence
  Non-cyclic GFR-binding peptide
  MOD_RES (14), (15): Xaa is C or S
LYLVSIPELKTPVXXAKGV

SEQ ID NO: 2479 - protein, 16 aa, Artificial Sequence
  Non-cyclic GFR-binding peptide
  MOD_RES (14), (15): Xaa is C or S
LYLISIPELDQPVXXP

SEQ ID NO: 2480 - protein, 17 aa, Artificial Sequence
  Non-cyclic GFR-binding peptide
  MOD_RES (14), (15): Xaa is C or S
LYLISIPELDQSVXXPS

SEQ ID NO: 2481 - protein, 16 aa, Artificial Sequence
  Non-cyclic GFR-binding peptide
  MOD_RES (14), (15): Xaa is C or S
FYLISIANLRAPVXXS

SEQ ID NO: 2482 - protein, 9 aa, Artificial Sequence
  Non-cyclic GFR-binding peptide
LYLVSIPEL

SEQ ID NO: 2483 - protein, 19 aa, Artificial Sequence
  Non-cyclic GFR-binding peptide
  MOD_RES (14), (15): Xaa is C or S
FYLISIANLRAPVXXSAPA

SEQ ID NO: 2484 - protein, 20 aa, Artificial Sequence
  Non-cyclic GFR-binding peptide
  MOD_RES (14), (15): Xaa is C or S
LYLISIPELDQSVXXPSASA

SEQ ID NO: 2485 - protein, 12 aa, Artificial Sequence
  Non-cyclic GFR-binding peptide
IYLVSIPSLQTP

SEQ ID NO: 2486 - protein, 17 aa, Artificial Sequence
  Non-cyclic GFR-binding peptide
  MOD_RES (14), (14): Xaa is C or S
LYLVSIPELKTPAXTPK

SEQ ID NO: 2487 - protein, 10 aa, Artificial Sequence
  Non-cyclic GFR-binding peptide
IYLVSIPSLK

SEQ ID NO: 2488 - protein, 11 aa, Artificial Sequence
  Non-cyclic GFR-binding peptide
LYLISIPELAQ

SEQ ID NO: 2489 - protein, 16 aa, Artificial Sequence
  Non-cyclic GFR-binding peptide
  MOD_RES (14), (15): Xaa is C or S
KYLISIPSLRAPVXXS

SEQ ID NO: 2490 - protein, 17 aa, Artificial Sequence
  Non-cyclic GFR-binding peptide
  MOD_RES (14), (15): Xaa is C or S
LYLVSIPELKTPAXXAK

SEQ ID NO: 2491 - protein, 10 aa, Artificial Sequence
  Non-cyclic GFR-binding peptide
LYLISIPELR

SEQ ID NO: 2492 - protein, 13 aa, Artificial Sequence
  Non-cyclic GFR-binding peptide
FYLISIANLRAPV

SEQ ID NO: 2493 - protein, 20 aa, Artificial Sequence
  Non-cyclic GFR-binding peptide
  MOD_RES (14), (15): Xaa is C or S
LYLMSIPELETPVXXAKPIS

SEQ ID NO: 2494 - protein, 20 aa, Artificial Sequence
  Non-cyclic GFR-binding peptide
  MOD_RES (14), (15): Xaa is C or S
LYLISIPELRAPVXXSAPAA

SEQ ID NO: 2495 - protein, 20 aa, Artificial Sequence
  Non-cyclic GFR-binding peptide
  MOD_RES (14), (14): Xaa is C or S
LYLVSIPELKTPAXTPKTVH

SEQ ID NO: 2496 - protein, 15 aa, Artificial Sequence
  Non-cyclic GFR-binding peptide
  MOD_RES (14), (15): Xaa is C or S
KYLISIPSLRAPVXX

SEQ ID NO: 2497 - protein, 15 aa, Artificial Sequence
  Non-cyclic GFR-binding peptide
  MOD_RES (14), (15): Xaa is C or S
LYLMSIPELETPVXX

SEQ ID NO: 2498 - protein, 15 aa, Artificial Sequence
  Non-cyclic GFR-binding peptide
  MOD_RES (14), (14): Xaa is C or S
LYLVSIPELKTPAXT

SEQ ID NO: 2499 - protein, 15 aa, Artificial Sequence
  Non-cyclic GFR-binding peptide
  MOD_RES (14), (15): Xaa is C or S
LYLISIPELDQPVXX

SEQ ID NO: 2500 - protein, 14 aa, Artificial Sequence
  Non-cyclic GFR-binding peptide
  MOD_RES (14), (14): Xaa is C or S
LYLVSIPELQTPAX

SEQ ID NO: 2501 - protein, 11 aa, Artificial Sequence
  Non-cyclic GFR-binding peptide
IYLISIPSLDQ

SEQ ID NO: 2502 - protein, 18 aa, Artificial Sequence
  Non-cyclic GFR-binding peptide
  MOD_RES (14), (15): Xaa is C or S
FYLISIANLRAPVXXSAP

SEQ ID NO: 2503 - protein, 19 aa, Artificial Sequence
  Non-cyclic GFR-binding peptide
  MOD_RES (14), (15): Xaa is C or S
LYLISIPELAQPVXXPAAS

SEQ ID NO: 2504 - protein, 11 aa, Artificial Sequence
  Non-cyclic GFR-binding peptide
LYLVSIPELQT

SEQ ID NO: 2505 - protein, 13 aa, Artificial Sequence
  Non-cyclic GFR-binding peptide
LYLVSIPELKTPV

SEQ ID NO: 2506 - protein, 11 aa, Artificial Sequence
  Non-cyclic GFR-binding peptide
IYLMSIPSLET

SEQ ID NO: 2507 - protein, 13 aa, Artificial Sequence
  Non-cyclic GFR-binding peptide
KYLISIPSLRAPV

SEQ ID NO: 2508 - protein, 11 aa, Artificial Sequence
  Non-cyclic GFR-binding peptide
IYLVSIPSLKT

SEQ ID NO: 2509 - protein, 16 aa, Artificial Sequence
  Non-cyclic GFR-binding peptide
  MOD_RES (14), (15): Xaa is C or S
LYLVSIPELKTPAXXP

SEQ ID NO: 2510 - protein, 17 aa, Artificial Sequence
  Non-cyclic GFR-binding peptide
  MOD_RES (14), (15): Xaa is C or S
IYLMSIPSLETPVXXAK

SEQ ID NO: 2511 - protein, 15 aa, Artificial Sequence
  Non-cyclic GFR-binding peptide
  MOD_RES (14), (15): Xaa is C or S
LYLVSIPELKTPVXX

SEQ ID NO: 2512 - protein, 17 aa, Artificial Sequence
  Non-cyclic GFR-binding peptide
  MOD_RES (14), (15): Xaa is C or S
IYLISIPSLAQPVXXPA

SEQ ID NO: 2513 - protein, 15 aa, Artificial Sequence
  Non-cyclic GFR-binding peptide
  MOD_RES (14), (15): Xaa is C or S
FYLISIANLRAPVXX

SEQ ID NO: 2514 - protein, 9 aa, Artificial Sequence
  Non-cyclic GFR-binding peptide
LYLMSIPEL

SEQ ID NO: 2515 - protein, 18 aa, Artificial Sequence
  Non-cyclic GFR-binding peptide
  MOD_RES (14), (15): Xaa is C or S
IYLVSIPSLKTPVXXAKG

SEQ ID NO: 2516 - protein, 19 aa, Artificial Sequence
  Non-cyclic GFR-binding peptide
  MOD_RES (14), (15): Xaa is C or S
LYLISIPELDQPVXXPSAS

SEQ ID NO: 2517 - protein, 20 aa, Artificial Sequence
  Non-cyclic GFR-binding peptide
  MOD_RES (14), (15): Xaa is C or S
LYLVSIPELKTPVXXAKGVK

SEQ ID NO: 2518 - protein, 20 aa, Artificial Sequence
  Non-cyclic GFR-binding peptide
  MOD_RES (14), (15): Xaa is C or S
IYLVSIPSLQTPAXXPKPVT

SEQ ID NO: 2519 - protein, 17 aa, Artificial Sequence
  Non-cyclic GFR-binding peptide
  MOD_RES (14), (15): Xaa is C or S
LYLISIPELAQPVXXPA

SEQ ID NO: 2520 - protein, 18 aa, Artificial Sequence
  Non-cyclic GFR-binding peptide
  MOD_RES (14), (15): Xaa is C or S
IYLISIPSLDQPVXXPSA

SEQ ID NO: 2521 - protein, 14 aa, Artificial Sequence
  Non-cyclic GFR-binding peptide
  MOD_RES (14), (14): Xaa is C or S
IYLVSIPSLKTPVX

SEQ ID NO: 2522 - protein, 17 aa, Artificial Sequence
  Non-cyclic GFR-binding peptide
  MOD_RES (14), (15): Xaa is C or S
IYLISIPSLDQPVXXPS

SEQ ID NO: 2523 - protein, 16 aa, Artificial Sequence
  Non-cyclic GFR-binding peptide
  MOD_RES (14), (15): Xaa is C or S
IYLISIPSLAQPVXXP

SEQ ID NO: 2524 - protein, 20 aa, Artificial Sequence
  Non-cyclic GFR-binding peptide
  MOD_RES (14), (15): Xaa is C or S
IYLVSIPSLKTPAXXAKPVA

SEQ ID NO: 2525 - protein, 16 aa, Artificial Sequence
  Non-cyclic GFR-binding peptide
  MOD_RES (14), (15): Xaa is C or S
LYLVSIPELQTPAXXP

SEQ ID NO: 2526 - protein, 20 aa, Artificial Sequence
  Non-cyclic GFR-binding peptide
  MOD_RES (14), (15): Xaa is C or S
LYLVSIPELQTPAXXPKPVT

SEQ ID NO: 2527 - protein, 19 aa, Artificial Sequence
  Non-cyclic GFR-binding peptide
  MOD_RES (14), (15): Xaa is C or S
LYLVSIPELQTPAXXPKPV

SEQ ID NO: 2528 - protein, 19 aa, Artificial Sequence
  Non-cyclic GFR-binding peptide
  MOD_RES (14), (15): Xaa is C or S
IYLISIPSLDQSVXXPSAS

SEQ ID NO: 2529 - protein, 17 aa, Artificial Sequence
  Non-cyclic GFR-binding peptide
  MOD_RES (14), (15): Xaa is C or S
LYLVSIPELKTPAXXPK

SEQ ID NO: 2530 - protein, 11 aa, Artificial Sequence
  Non-cyclic GFR-binding peptide
LYLVSIPELKT

SEQ ID NO: 2531 - protein, 18 aa, Artificial Sequence
  Non-cyclic GFR-binding peptide
  MOD_RES (14), (15): Xaa is C or S
LYLISIPELDQPVXXPSA

SEQ ID NO: 2532 - protein, 20 aa, Artificial Sequence
  Non-cyclic GFR-binding peptide
  MOD_RES (14), (15): Xaa is C or S
LYLISIPELAQPVXXPAASA

SEQ ID NO: 2533 - protein, 13 aa, Artificial Sequence
  Non-cyclic GFR-binding peptide
FYLISIANLKTPV

SEQ ID NO: 2534 - protein, 20 aa, Artificial Sequence
  Non-cyclic GFR-binding peptide
  MOD_RES (14), (15): Xaa is C or S
IYLVSIPSLKTPVXXAKGVK

SEQ ID NO: 2535 - protein, 15 aa, Artificial Sequence
  Non-cyclic GFR-binding peptide
  MOD_RES (14), (15): Xaa is C or S
FYLISIANLKTPVXX

SEQ ID NO: 2536 - protein, 17 aa, Artificial Sequence
  Non-cyclic GFR-binding peptide
  MOD_RES (14), (15): Xaa is C or S
LYLMSIPELETPVXXAK

SEQ ID NO: 2537 - protein, 12 aa, Artificial Sequence
  Non-cyclic GFR-binding peptide
KYLISIPSLRAP

SEQ ID NO: 2538 - protein, 15 aa, Artificial Sequence
  Non-cyclic GFR-binding peptide
  MOD_RES (14), (14): Xaa is C or S
IYLVSIPSLKTPAXT

SEQ ID NO: 2539 - protein, 12 aa, Artificial Sequence
  Non-cyclic GFR-binding peptide
IYLMSIPSLETP

SEQ ID NO: 2540 - protein, 9 aa, Artificial Sequence
  Non-cyclic GFR-binding peptide
IYLMSIPSL

SEQ ID NO: 2541 - protein, 13 aa, Artificial Sequence
  Non-cyclic GFR-binding peptide
LYLVSIPELKTPA

SEQ ID NO: 2542 - protein, 10 aa, Artificial Sequence
  Non-cyclic GFR-binding peptide
KYLISIPSLK

SEQ ID NO: 2543 - protein, 10 aa, Artificial Sequence
  Non-cyclic GFR-binding peptide
IYLISIPSLK

SEQ ID NO: 2544 - protein, 11 aa, Artificial Sequence
  Non-cyclic GFR-binding peptide
LYLISIPELRA

SEQ ID NO: 2545 - protein, 15 aa, Artificial Sequence
  Non-cyclic GFR-binding peptide
  MOD_RES (14), (15): Xaa is C or S
IYLMSIPSLETPVXX

SEQ ID NO: 2546 - protein, 20 aa, Artificial Sequence
  Non-cyclic GFR-binding peptide
  MOD_RES (14), (15): Xaa is C or S
IYLISIPSLDQPVXXPSASA

SEQ ID NO: 2547 - protein, 17 aa, Artificial Sequence
  Non-cyclic GFR-binding peptide
  MOD_RES (14), (15): Xaa is C or S
LYLVSIPELKTPVXXAK

SEQ ID NO: 2548 - protein, 14 aa, Artificial Sequence
  Non-cyclic GFR-binding peptide
  MOD_RES (14), (14): Xaa is C or S
LYLISIPELAQPVX

SEQ ID NO: 2549 - protein, 14 aa, Artificial Sequence
  Non-cyclic GFR-binding peptide
  MOD_RES (14), (14): Xaa is C or S
IYLMSIPSLETPVX

SEQ ID NO: 2550 - protein, 16 aa, Artificial Sequence
  Non-cyclic GFR-binding peptide
  MOD_RES (14), (15): Xaa is C or S
IYLISIPSLDQSVXXP

SEQ ID NO: 2551 - protein, 14 aa, Artificial Sequence
  Non-cyclic GFR-binding peptide
  MOD_RES (14), (14): Xaa is C or S
LYLVSIPELKTPAX

SEQ ID NO: 2552 - protein, 18 aa, Artificial Sequence
  Non-cyclic GFR-binding peptide
  MOD_RES (14), (14): Xaa is C or S
LYLVSIPELKTPAXTPKT

SEQ ID NO: 2553 - protein, 18 aa, Artificial Sequence
  Non-cyclic GFR-binding peptide
  MOD_RES (14), (15): Xaa is C or S
KYLISIPSLKTPVXXAKS

SEQ ID NO: 2554 - protein, 18 aa, Artificial Sequence
  Non-cyclic GFR-binding peptide
  MOD_RES (14), (15): Xaa is C or S
IYLISIPSLKTPVXXAKS

SEQ ID NO: 2555 - protein, 17 aa, Artificial Sequence
  Non-cyclic GFR-binding peptide
  MOD_RES (14), (15): Xaa is C or S
LYLVSIPELQTPAXXPK

SEQ ID NO: 2556 - protein, 12 aa, Artificial Sequence
  Non-cyclic GFR-binding peptide
LYLISIPELDQP

SEQ ID NO: 2557 - protein, 14 aa, Artificial Sequence
  Non-cyclic GFR-binding peptide
  MOD_RES (14), (14): Xaa is C or S
KYLISIPSLRAPVX

SEQ ID NO: 2558 - protein, 12 aa, Artificial Sequence
  Non-cyclic GFR-binding peptide
IYLVSIPSLKTP

SEQ ID NO: 2559 - protein, 20 aa, Artificial Sequence
  Non-cyclic GFR-binding peptide
  MOD_RES (14), (15): Xaa is C or S
LYLMSIPELETPVXXAKPIK

SEQ ID NO: 2560 - protein, 16 aa, Artificial Sequence
  Non-cyclic GFR-binding peptide
  MOD_RES (14), (15): Xaa is C or S
LYLVSIPELKTPVXXA

SEQ ID NO: 2561 - protein, 16 aa, Artificial Sequence
  Non-cyclic GFR-binding peptide
  MOD_RES (14), (15): Xaa is C or S
LYLMSIPELETPVXXA

SEQ ID NO: 2562 - protein, 17 aa, Artificial Sequence
  Non-cyclic GFR-binding peptide
  MOD_RES (14), (15): Xaa is C or S
FYLISIANLKTPVXXAK

SEQ ID NO: 2563 - protein, 18 aa, Artificial Sequence
  Non-cyclic GFR-binding peptide
  MOD_RES (14), (15): Xaa is C or S
LYLVSIPELQTPAXXPKP

SEQ ID NO: 2564 - protein, 20 aa, Artificial Sequence
  Non-cyclic GFR-binding peptide
  MOD_RES (14), (15): Xaa is C or S
KYLISIPSLRAPVXXSAPAA

SEQ ID NO: 2565 - protein, 14 aa, Artificial Sequence
  Non-cyclic GFR-binding peptide
  MOD_RES (14), (14): Xaa is C or S
LYLISIPELDQPVX

SEQ ID NO: 2566 - protein, 13 aa, Artificial Sequence
  Non-cyclic GFR-binding peptide
LYLVSIPELQTPA

SEQ ID NO: 2567 - protein, 16 aa, Artificial Sequence
  Non-cyclic GFR-binding peptide
  MOD_RES (14), (15): Xaa is C or S
LYLISIPELRAPVXXS

SEQ ID NO: 2568 - protein, 15 aa, Artificial Sequence
  Non-cyclic GFR-binding peptide
  MOD_RES (14), (15): Xaa is C or S
LYLVSIPELQTPAXX

SEQ ID NO: 2569 - protein, 19 aa, Artificial Sequence
  Non-cyclic GFR-binding peptide
  MOD_RES (14), (15): Xaa is C or S
LYLVSIPELKTPAXXAKPV

SEQ ID NO: 2570 - protein, 11 aa, Artificial Sequence
  Non-cyclic GFR-binding peptide
FYLISIANLKT

SEQ ID NO: 2571 - protein, 19 aa, Artificial Sequence
  Non-cyclic GFR-binding peptide
  MOD_RES (14), (14): Xaa is C or S
LYLVSIPELKTPAXTPKTV

SEQ ID NO: 2572 - protein, 12 aa, Artificial Sequence
  Non-cyclic GFR-binding peptide
IYLISIPSLKTP

SEQ ID NO: 2573 - protein, 17 aa, Artificial Sequence
  Non-cyclic GFR-binding peptide
  MOD_RES (14), (15): Xaa is C or S
IYLISIPSLDQSVXXPS

SEQ ID NO: 2574 - protein, 20 aa, Artificial Sequence
  Non-cyclic GFR-binding peptide
  MOD_RES (14), (15): Xaa is C or S
KYLISIPSLKTPVXXAKSAK

SEQ ID NO: 2575 - protein, 20 aa, Artificial Sequence
  Non-cyclic GFR-binding peptide
  MOD_RES (14), (15): Xaa is C or S
IYLISIPSLKTPVXXAKSAK

SEQ ID NO: 2576 - protein, 13 aa, Artificial Sequence
  Non-cyclic GFR-binding peptide
LYLISIPELRAPV

SEQ ID NO: 2577 - protein, 15 aa, Artificial Sequence
  Non-cyclic GFR-binding peptide
  MOD_RES (14), (15): Xaa is C or S
IYLVSIPSLKTPAXX

SEQ ID NO: 2578 - protein, 20 aa, Artificial Sequence
  Non-cyclic GFR-binding peptide
  MOD_RES (14), (15): Xaa is C or S
FYLISIANLRAPVXXSAPAA

SEQ ID NO: 2579 - protein, 19 aa, Artificial Sequence
  Non-cyclic GFR-binding peptide
  MOD_RES (14), (15): Xaa is C or S
LYLISIPELRAPVXXSAPA

SEQ ID NO: 2580 - protein, 16 aa, Artificial Sequence
  Non-cyclic GFR-binding peptide
  MOD_RES (14), (15): Xaa is C or S
IYLVSIPSLKTPAXXP

SEQ ID NO: 2581 - protein, 19 aa, Artificial Sequence
  Non-cyclic GFR-binding peptide
  MOD_RES (14), (15): Xaa is C or S
IYLISIPSLAQPVXXPAAS

SEQ ID NO: 2582 - protein, 18 aa, Artificial Sequence
  Non-cyclic GFR-binding peptide
  MOD_RES (14), (15): Xaa is C or S
LYLMSIPELETPVXXAKP

SEQ ID NO: 2583 - protein, 18 aa, Artificial Sequence
  Non-cyclic GFR-binding peptide
  MOD_RES (14), (15): Xaa is C or S
LYLISIPELDQSVXXPSA

SEQ ID NO: 2584 - protein, 19 aa, Artificial Sequence
  Non-cyclic GFR-binding peptide
  MOD_RES (14), (15): Xaa is C or S
IYLMSIPSLETPVXXAKPI

SEQ ID NO: 2585 - protein, 13 aa, Artificial Sequence
  Non-cyclic GFR-binding peptide
IYLISIPSLDQPV

SEQ ID NO: 2586 - protein, 10 aa, Artificial Sequence
  Non-cyclic GFR-binding peptide
LYLMSIPELE

SEQ ID NO: 2587 - protein, 17 aa, Artificial Sequence
  Non-cyclic GFR-binding peptide
  MOD_RES (14), (15): Xaa is C or S
KYLISIPSLRAPVXXSA

SEQ ID NO: 2588 - protein, 14 aa, Artificial Sequence
  Non-cyclic GFR-binding peptide
  MOD_RES (14), (14): Xaa is C or S
IYLVSIPSLQTPAX

SEQ ID NO: 2589 - protein, 12 aa, Artificial Sequence
  Non-cyclic GFR-binding peptide
LYLISIPELAQP

SEQ ID NO: 2590 - protein, 12 aa, Artificial Sequence
  Non-cyclic GFR-binding peptide
KYLISIPSLKTP

SEQ ID NO: 2591 - protein, 16 aa, Artificial Sequence
  Non-cyclic GFR-binding peptide
  MOD_RES (14), (15): Xaa is C or S
IYLMSIPSLETPVXXA

SEQ ID NO: 2592 - protein, 15 aa, Artificial Sequence
  Non-cyclic GFR-binding peptide
  MOD_RES (14), (15): Xaa is C or S
IYLVSIPSLKTPVXX

SEQ ID NO: 2593 - protein, 11 aa, Artificial Sequence
  Non-cyclic GFR-binding peptide
KYLISIPSLRA

SEQ ID NO: 2594 - protein, 14 aa, Artificial Sequence
  Non-cyclic GFR-binding peptide
  MOD_RES (14), (14): Xaa is C or S
IYLISIPSLDQSVX

SEQ ID NO: 2595 - protein, 13 aa, Artificial Sequence
  Non-cyclic GFR-binding peptide
IYLMSIPSLETPV

SEQ ID NO: 2596 - protein, 18 aa, Artificial Sequence
  Non-cyclic GFR-binding peptide
  MOD_RES (14), (15): Xaa is C or S
LYLVSIPELKTPAXXPKP

SEQ ID NO: 2597 - protein, 20 aa, Artificial Sequence
  Non-cyclic GFR-binding peptide
  MOD_RES (14), (15): Xaa is C or S
IYLMSIPSLETPVXXAKPIS

SEQ ID NO: 2598 - protein, 13 aa, Artificial Sequence
  Non-cyclic GFR-binding peptide
IYLVSIPSLKTPV

SEQ ID NO: 2599 - protein, 19 aa, Artificial Sequence
  Non-cyclic GFR-binding peptide
  MOD_RES (14), (15): Xaa is C or S
IYLVSIPSLKTPAXXAKPV

SEQ ID NO: 2600 - protein, 18 aa, Artificial Sequence
  Non-cyclic GFR-binding peptide
  MOD_RES (14), (15): Xaa is C or S
LYLVSIPELKTPVXXAKG

SEQ ID NO: 2601 - protein, 11 aa, Artificial Sequence
  Non-cyclic GFR-binding peptide
FYLISIANLRA

SEQ ID NO: 2602 - protein, 19 aa, Artificial Sequence
  Non-cyclic GFR-binding peptide
  MOD_RES (14), (15): Xaa is C or S
IYLISIPSLDQPVXXPSAS

SEQ ID NO: 2603 - protein, 16 aa, Artificial Sequence
  Non-cyclic GFR-binding peptide
  MOD_RES (14), (15): Xaa is C or S
IYLISIPSLKTPVXXA

SEQ ID NO: 2604 - protein, 20 aa, Artificial Sequence
  Non-cyclic GFR-binding peptide
  MOD_RES (14), (15): Xaa is C or S
FYLISIANLKTPVXXAKSAK

SEQ ID NO: 2605 - protein, 16 aa, Artificial Sequence
  Non-cyclic GFR-binding peptide
  MOD_RES (14), (15): Xaa is C or S
KYLISIPSLKTPVXXA

SEQ ID NO: 2606 - protein, 20 aa, Artificial Sequence
  Non-cyclic GFR-binding peptide
  MOD_RES (14), (15): Xaa is C or S
IYLVSIPSLKTPAXXPKPVY

SEQ ID NO: 2607 - protein, 13 aa, Artificial Sequence
  Non-cyclic GFR-binding peptide
LYLISIPELAQPV

SEQ ID NO: 2608 - protein, 16 aa, Artificial Sequence
  Non-cyclic GFR-binding peptide
  MOD_RES (14), (15): Xaa is C or S
FYLISIANLKTPVXXA

SEQ ID NO: 2609 - protein, 11 aa, Artificial Sequence
  Non-cyclic GFR-binding peptide
LYLMSIPELET

SEQ ID NO: 2610 - protein, 15 aa, Artificial Sequence
  Non-cyclic GFR-binding peptide
  MOD_RES (14), (15): Xaa is C or S
LYLISIPELRAPVXX

SEQ ID NO: 2611 - protein, 12 aa, Artificial Sequence
  Non-cyclic GFR-binding peptide
LYLISIPELRAP

SEQ ID NO: 2612 - protein, 18 aa, Artificial Sequence
  Non-cyclic GFR-binding peptide
  MOD_RES (14), (15): Xaa is C or S
LYLVSIPELKTPAXXAKP

SEQ ID NO: 2613 - protein, 11 aa, Artificial Sequence
  Non-cyclic GFR-binding peptide
IYLVSIPSLQT

SEQ ID NO: 2614 - protein, 19 aa, Artificial Sequence
  Non-cyclic GFR-binding peptide
  MOD_RES (14), (15): Xaa is C or S
KYLISIPSLKTPVXXAKSA

SEQ ID NO: 2615 - protein, 19 aa, Artificial Sequence
  Non-cyclic GFR-binding peptide
  MOD_RES (14), (15): Xaa is C or S
IYLISIPSLKTPVXXAKSA

SEQ ID NO: 2616 - protein, 17 aa, Artificial Sequence
  Non-cyclic GFR-binding peptide
  MOD_RES (14), (15): Xaa is C or S
FYLISIANLRAPVXXSA

SEQ ID NO: 2617 - protein, 19 aa, Artificial Sequence
  Non-cyclic GFR-binding peptide
  MOD_RES (14), (15): Xaa is C or S
IYLVSIPSLQTPAXXPKPV

SEQ ID NO: 2618 - protein, 11 aa, Artificial Sequence
  Non-cyclic GFR-binding peptide
LYLISIPELDQ

SEQ ID NO: 2619 - protein, 19 aa, Artificial Sequence
  Non-cyclic GFR-binding peptide
  MOD_RES (14), (15): Xaa is C or S
FYLISIANLKTPVXXAKSA

SEQ ID NO: 2620 - protein, 12 aa, Artificial Sequence
  Non-cyclic GFR-binding peptide
LYLISIPELDQS

SEQ ID NO: 2621 - protein, 16 aa, Artificial Sequence
  Non-cyclic GFR-binding peptide
  MOD_RES (14), (15): Xaa is C or S
IYLVSIPSLKTPAXXA

SEQ ID NO: 2622 - protein, 9 aa, Artificial Sequence
  Non-cyclic GFR-binding peptide
IYLVSIPSL

SEQ ID NO: 2623 - protein, 12 aa, Artificial Sequence
  Non-cyclic GFR-binding peptide
FYLISIANLKTP

SEQ ID NO: 2624 - protein, 16 aa, Artificial Sequence
  Non-cyclic GFR-binding peptide
  MOD_RES (14), (14): Xaa is C or S
IYLVSIPSLKTPAXTP

SEQ ID NO: 2625 - protein, 17 aa, Artificial Sequence
  Non-cyclic GFR-binding peptide
  MOD_RES (14), (15): Xaa is C or S
IYLVSIPSLKTPVXXAK

SEQ ID NO: 2626 - protein, 19 aa, Artificial Sequence
  Non-cyclic GFR-binding peptide
  MOD_RES (14), (15): Xaa is C or S
IYLVSIPSLKTPAXXPKPV

SEQ ID NO: 2627 - protein, 10 aa, Artificial Sequence
  Non-cyclic GFR-binding peptide
LYLISIPELA

SEQ ID NO: 2628 - protein, 16 aa, Artificial Sequence
  Non-cyclic GFR-binding peptide
  MOD_RES (14), (15): Xaa is C or S
IYLISIPSLDQPVXXP

SEQ ID NO: 2629 - protein, 10 aa, Artificial Sequence
  Non-cyclic GFR-binding peptide
IYLVSIPSLQ

SEQ ID NO: 2630 - protein, 15 aa, Artificial Sequence
  Non-cyclic GFR-binding peptide
  MOD_RES (14), (15): Xaa is C or S
LYLISIPELAQPVXX

SEQ ID NO: 2631 - protein, 13 aa, Artificial Sequence
  Non-cyclic GFR-binding peptide
IYLISIPSLDQSV

SEQ ID NO: 2632 - protein, 15 aa, Artificial Sequence
  Non-cyclic GFR-binding peptide
  MOD_RES (14), (15): Xaa is C or S
IYLISIPSLDQSVXX

SEQ ID NO: 2633 - protein, 18 aa, Artificial Sequence
  Non-cyclic GFR-binding peptide
  MOD_RES (14), (15): Xaa is C or S
KYLISIPSLRAPVXXSAP

SEQ ID NO: 2634 - protein, 20 aa, Artificial Sequence
  Non-cyclic GFR-binding peptide
  MOD_RES (14), (15): Xaa is C or S
IYLISIPSLDQSVXXPSASA

SEQ ID NO: 2635 - protein, 11 aa, Artificial Sequence
  Non-cyclic GFR-binding peptide
IYLISIPSLAQ

SEQ ID NO: 2636 - protein, 17 aa, Artificial Sequence
  Non-cyclic GFR-binding peptide
  MOD_RES (14), (14): Xaa is C or S
IYLVSIPSLKTPAXTPK

SEQ ID NO: 2637 - protein, 20 aa, Artificial Sequence
  Non-cyclic GFR-binding peptide
  MOD_RES (14), (15): Xaa is C or S
LYLVSIPELKTPAXXAKPVA

SEQ ID NO: 2638 - protein, 16 aa, Artificial Sequence
  Non-cyclic GFR-binding peptide
  MOD_RES (14), (15): Xaa is C or S
IYLVSIPSLQTPAXXP

SEQ ID NO: 2639 - protein, 15 aa, Artificial Sequence
  Non-cyclic GFR-binding peptide
  MOD_RES (14), (15): Xaa is C or S
IYLISIPSLAQPVXX

SEQ ID NO: 2640 - protein, 18 aa, Artificial Sequence
  Non-cyclic GFR-binding peptide
  MOD_RES (14), (15): Xaa is C or S
LYLISIPELAQPVXXPAA

SEQ ID NO: 2641 - protein, 12 aa, Artificial Sequence
  Non-cyclic GFR-binding peptide
LYLVSIPELKTP

SEQ ID NO: 2642 - protein, 15 aa, Artificial Sequence
  Non-cyclic GFR-binding peptide
  MOD_RES (14), (15): Xaa is C or S
IYLISIPSLKTPVXX

SEQ ID NO: 2643 - protein, 15 aa, Artificial Sequence
  Non-cyclic GFR-binding peptide
  MOD_RES (14), (15): Xaa is C or S
KYLISIPSLKTPVXX

SEQ ID NO: 2644 - protein, 17 aa, Artificial Sequence
  Non-cyclic GFR-binding peptide
  MOD_RES (14), (15): Xaa is C or S
LYLISIPELDQPVXXPS

SEQ ID NO: 2645 - protein, 14 aa, Artificial Sequence
  Non-cyclic GFR-binding peptide
  MOD_RES (14), (14): Xaa is C or S
LYLISIPELRAPVX

SEQ ID NO: 2646 - protein, 18 aa, Artificial Sequence
  Non-cyclic GFR-binding peptide
  MOD_RES (14), (15): Xaa is C or S
IYLISIPSLAQPVXXPAA

SEQ ID NO: 2647 - protein, 14 aa, Artificial Sequence
  Non-cyclic GFR-binding peptide
  MOD_RES (14), (14): Xaa is C or S
LYLMSIPELETPVX

SEQ ID NO: 2648 - protein, 16 aa, Artificial Sequence
  Non-cyclic GFR-binding peptide
  MOD_RES (14), (15): Xaa is C or S
LYLISIPELDQSVXXP

SEQ ID NO: 2649 - protein, 14 aa, Artificial Sequence
  Non-cyclic GFR-binding peptide
  MOD_RES (14), (14): Xaa is C or S
IYLVSIPSLKTPAX

SEQ ID NO: 2650 - protein, 16 aa, Artificial Sequence
  Non-cyclic GFR-binding peptide
  MOD_RES (14), (15): Xaa is C or S
LYLISIPELAQPVXXP

SEQ ID NO: 2651 - protein, 18 aa, Artificial Sequence
  Non-cyclic GFR-binding peptide
  MOD_RES (14), (15): Xaa is C or S
IYLVSIPSLQTPAXXPKP

SEQ ID NO: 2652 - protein, 20 aa, Artificial Sequence
  Non-cyclic GFR-binding peptide
  MOD_RES (14), (15): Xaa is C or S
LYLISIPELDQPVXXPSASA

SEQ ID NO: 2653 - protein, 10 aa, Artificial Sequence
  Non-cyclic GFR-binding peptide
FYLISIANLK

SEQ ID NO: 2654 - protein, 13 aa, Artificial Sequence
  Non-cyclic GFR-binding peptide
IYLVSIPSLQTPA

SEQ ID NO: 2655 - protein, 13 aa, Artificial Sequence
  Non-cyclic GFR-binding peptide
IYLISIPSLKTPV

SEQ ID NO: 2656 - protein, 10 aa, Artificial Sequence
  Non-cyclic GFR-binding peptide
IYLISIPSLA

SEQ ID NO: 2657 - protein, 14 aa, Artificial Sequence
  Non-cyclic GFR-binding peptide
  MOD_RES (14), (14): Xaa is C or S
LYLVSIPELKTPVX

SEQ ID NO: 2658 - protein, 13 aa, Artificial Sequence
  Non-cyclic GFR-binding peptide
KYLISIPSLKTPV

SEQ ID NO: 2659 - protein, 16 aa, Artificial Sequence
  Non-cyclic GFR-binding peptide
  MOD_RES (14), (15): Xaa is C or S
LYLVSIPELKTPAXXA

SEQ ID NO: 2660 - protein, 10 aa, Artificial Sequence
  Non-cyclic GFR-binding peptide
KYLISIPSLR

SEQ ID NO: 2661 - protein, 17 aa, Artificial Sequence
  Non-cyclic GFR-binding peptide
  MOD_RES (14), (15): Xaa is C or S
IYLVSIPSLKTPAXXAK

SEQ ID NO: 2662 - protein, 13 aa, Artificial Sequence
  Non-cyclic GFR-binding peptide
IYLISIPSLAQPV

SEQ ID NO: 2663 - protein, 15 aa, Artificial Sequence
  Non-cyclic GFR-binding peptide
  MOD_RES (14), (15): Xaa is C or S
IYLVSIPSLQTPAXX

SEQ ID NO: 2664 - protein, 12 aa, Artificial Sequence
  Non-cyclic GFR-binding peptide
IYLISIPSLDQP

SEQ ID NO: 2665 - protein, 15 aa, Artificial Sequence
  Non-cyclic GFR-binding peptide
  MOD_RES (14), (15): Xaa is C or S
LYLISIPELDQSVXX

SEQ ID NO: 2666 - protein, 14 aa, Artificial Sequence
  Non-cyclic GFR-binding peptide
  MOD_RES (14), (14): Xaa is C or S
IYLISIPSLDQPVX

SEQ ID NO: 2667 - protein, 13 aa, Artificial Sequence
  Non-cyclic GFR-binding peptide
LYLISIPELDQSV

SEQ ID NO: 2668 - protein, 18 aa, Artificial Sequence
  Non-cyclic GFR-binding peptide
  MOD_RES (14), (15): Xaa is C or S
LYLISIPELRAPVXXSAP

SEQ ID NO: 2669 - protein, 19 aa, Artificial Sequence
  Non-cyclic GFR-binding peptide
  MOD_RES (14), (14): Xaa is C or S
IYLVSIPSLKTPAXTPKTV

SEQ ID NO: 2670 - protein, 18 aa, Artificial Sequence
  Non-cyclic GFR-binding peptide
  MOD_RES (14), (14): Xaa is C or S
IYLVSIPSLKTPAXTPKT

SEQ ID NO: 2671 - protein, 18 aa, Artificial Sequence
  Non-cyclic GFR-binding peptide
  MOD_RES (14), (15): Xaa is C or S
IYLVSIPSLKTPAXXAKP

SEQ ID NO: 2672 - protein, 10 aa, Artificial Sequence
  Non-cyclic GFR-binding peptide
LYLVSIPELQ

SEQ ID NO: 2673 - protein, 15 aa, Artificial Sequence
  Non-cyclic GFR-binding peptide
  MOD_RES (14), (15): Xaa is C or S
IYLISIPSLDQPVXX

SEQ ID NO: 2674 - protein, 20 aa, Artificial Sequence
  Non-cyclic GFR-binding peptide
  MOD_RES (14), (15): Xaa is C or S
IYLISIPSLAQPVXXPAASA

SEQ ID NO: 2675 - protein, 20 aa, Artificial Sequence
  Non-cyclic GFR-binding peptide
  MOD_RES (14), (15): Xaa is C or S
IYLMSIPSLETPVXXAKPIK

SEQ ID NO: 2676 - protein, 16 aa, Artificial Sequence
  Non-cyclic GFR-binding peptide
  MOD_RES (14), (15): Xaa is C or S
IYLVSIPSLKTPVXXA

SEQ ID NO: 2677 - protein, 18 aa, Artificial Sequence
  Non-cyclic GFR-binding peptide
  MOD_RES (14), (15): Xaa is C or S
FYLISIANLKTPVXXAKS

SEQ ID NO: 2678 - protein, 12 aa, Artificial Sequence
  Non-cyclic GFR-binding peptide
IYLISIPSLDQS

SEQ ID NO: 2679 - protein, 19 aa, Artificial Sequence
  Non-cyclic GFR-binding peptide
  MOD_RES (14), (15): Xaa is C or S
LYLISIPELDQSVXXPSAS

SEQ ID NO: 2680 - protein, 17 aa, Artificial Sequence
  Non-cyclic GFR-binding peptide
  MOD_RES (14), (15): Xaa is C or S
IYLVSIPSLKTPAXXPK

SEQ ID NO: 2681 - protein, 12 aa, Artificial Sequence
  Non-cyclic GFR-binding peptide
LYLMSIPELETP

SEQ ID NO: 2682 - protein, 17 aa, Artificial Sequence
  Non-cyclic GFR-binding peptide
  MOD_RES (14), (15): Xaa is C or S
IYLVSIPSLQTPAXXPK

SEQ ID NO: 2683 - protein, 14 aa, Artificial Sequence
  Non-cyclic GFR-binding peptide
  MOD_RES (14), (14): Xaa is C or S
FYLISIANLRAPVX

SEQ ID NO: 2684 - protein, 14 aa, Artificial Sequence
  Non-cyclic GFR-binding peptide
  MOD_RES (14), (14): Xaa is C or S
IYLISIPSLAQPVX

SEQ ID NO: 2685 - protein, 19 aa, Artificial Sequence
  Non-cyclic GFR-binding peptide
  MOD_RES (14), (15): Xaa is C or S
IYLVSIPSLKTPVXXAKGV

SEQ ID NO: 2686 - protein, 18 aa, Artificial Sequence
  Non-cyclic GFR-binding peptide
  MOD_RES (14), (15): Xaa is C or S
IYLVSIPSLKTPAXXPKP

SEQ ID NO: 2687 - protein, 19 aa, Artificial Sequence
  Non-cyclic GFR-binding peptide
  MOD_RES (14), (15): Xaa is C or S
LYLMSIPELETPVXXAKPI

SEQ ID NO: 2688 - protein, 10 aa, Artificial Sequence
  Non-cyclic GFR-binding peptide
IYLISIPSLD

SEQ ID NO: 2689 - protein, 20 aa, Artificial Sequence
  Non-cyclic GFR-binding peptide
  MOD_RES (14), (14): Xaa is C or S
IYLVSIPSLKTPAXTPKTVH

SEQ ID NO: 2690 - protein, 13 aa, Artificial Sequence
  Non-cyclic GFR-binding peptide
IYLVSIPSLKTPA

SEQ ID NO: 2691 - protein, 20 aa, Artificial Sequence
  Non-cyclic GFR-binding peptide
  MOD_RES (14), (15): Xaa is C or S
LYLVSIPELKTPAXXPKPVY

SEQ ID NO: 2692 - protein, 11 aa, Artificial Sequence
  Non-cyclic GFR-binding peptide
KYLISIPSLKT

SEQ ID NO: 2693 - protein, 17 aa, Artificial Sequence
  Non-cyclic GFR-binding peptide
  MOD_RES (14), (15): Xaa is C or S
KYLISIPSLKTPVXXAK

SEQ ID NO: 2694 - protein, 17 aa, Artificial Sequence
  Non-cyclic GFR-binding peptide
  MOD_RES (14), (15): Xaa is C or S
IYLISIPSLKTPVXXAK

SEQ ID NO: 2695 - protein, 12 aa, Artificial Sequence
  Non-cyclic GFR-binding peptide
LYLVSIPELQTP

SEQ ID NO: 2696 - protein, 11 aa, Artificial Sequence
  Non-cyclic GFR-binding peptide
IYLISIPSLKT

SEQ ID NO: 2697 - protein, 10 aa, Artificial Sequence
  Non-cyclic GFR-binding peptide
LYLVSIPELK

SEQ ID NO: 2698 - protein, 10 aa, Artificial Sequence
  Non-cyclic GFR-binding peptide
ELSPISMLYI

SEQ ID NO: 2699 - protein, 18 aa, Artificial Sequence
  Non-cyclic GFR-binding peptide
  MOD_RES (4), (5): Xaa is C or S
ASPXXVSQDLSPISILYI

SEQ ID NO: 2700 - protein, 13 aa, Artificial Sequence
  Non-cyclic GFR-binding peptide
VPQDLEPISILYL

SEQ ID NO: 2701 - protein, 14 aa, Artificial Sequence
  Non-cyclic GFR-binding peptide
  MOD_RES (1), (1): Xaa is C or S
XVPTKLNAISILYF

SEQ ID NO: 2702 - protein, 13 aa, Artificial Sequence
  Non-cyclic GFR-binding peptide
VPTELEPISMLYL

SEQ ID NO: 2703 - protein, 15 aa, Artificial Sequence
  Non-cyclic GFR-binding peptide
  MOD_RES (1), (2): Xaa is C or S
XXAPTKLEPISVLYL

SEQ ID NO: 2704 - protein, 19 aa, Artificial Sequence
  Non-cyclic GFR-binding peptide
  MOD_RES (5), (6): Xaa is C or S
APASXXVPARLSPISILYK

SEQ ID NO: 2705 - protein, 14 aa, Artificial Sequence
  Non-cyclic GFR-binding peptide
  MOD_RES (1), (1): Xaa is C or S
XVSQDLEPISILYL

SEQ ID NO: 2706 - protein, 16 aa, Artificial Sequence
  Non-cyclic GFR-binding peptide
  MOD_RES (3), (3): Xaa is C or S
PTXAPTKLEPISVLYL

SEQ ID NO: 2707 - protein, 19 aa, Artificial Sequence
  Non-cyclic GFR-binding peptide
  MOD_RES (5), (6): Xaa is C or S
VPKPXXAPTKLEPISVLYL

SEQ ID NO: 2708 - protein, 10 aa, Artificial Sequence
  Non-cyclic GFR-binding peptide
DLEPISILYL

SEQ ID NO: 2709 - protein, 17 aa, Artificial Sequence
  Non-cyclic GFR-binding peptide
  MOD_RES (3), (4): Xaa is C or S
ASXXVPARLEPISILYL

SEQ ID NO: 2710 - protein, 12 aa, Artificial Sequence
  Non-cyclic GFR-binding peptide
PQALSPISILYI

SEQ ID NO: 2711 - protein, 12 aa, Artificial Sequence
  Non-cyclic GFR-binding peptide
PARLNAISILYF

SEQ ID NO: 2712 - protein, 18 aa, Artificial Sequence
  Non-cyclic GFR-binding peptide
  MOD_RES (4), (5): Xaa is C or S
PKAXXVPTELSPISMLYI

SEQ ID NO: 2713 - protein, 14 aa, Artificial Sequence
  Non-cyclic GFR-binding peptide
  MOD_RES (1), (1): Xaa is C or S
XVPTKLSPISILYI

SEQ ID NO: 2714 - protein, 14 aa, Artificial Sequence
  Non-cyclic GFR-binding peptide
  MOD_RES (1), (1): Xaa is C or S
XVPTKLSPISILYK

SEQ ID NO: 2715 - protein, 19 aa, Artificial Sequence
  Non-cyclic GFR-binding peptide
  MOD_RES (5), (6): Xaa is C or S
VGKAXXVPTKLEPISVLYL

SEQ ID NO: 2716 - protein, 16 aa, Artificial Sequence
  Non-cyclic GFR-binding peptide
  MOD_RES (2), (3): Xaa is C or S
PXXVPQDLEPISILYL

SEQ ID NO: 2717 - protein, 17 aa, Artificial Sequence
  Non-cyclic GFR-binding peptide
  MOD_RES (3), (4): Xaa is C or S
SPXXVSQDLEPISILYL

SEQ ID NO: 2718 - protein, 16 aa, Artificial Sequence
  Non-cyclic GFR-binding peptide
  MOD_RES (2), (3): Xaa is C or S
SXXVPARLNAISILYF

SEQ ID NO: 2719 - protein, 9 aa, Artificial Sequence
  Non-cyclic GFR-binding peptide
LEPISVLYL

SEQ ID NO: 2720 - protein, 19 aa, Artificial Sequence
  Non-cyclic GFR-binding peptide
  MOD_RES (5), (6): Xaa is C or S
APASXXVPARLNAISILYF

SEQ ID NO: 2721 - protein, 20 aa, Artificial Sequence
  Non-cyclic GFR-binding peptide
  MOD_RES (6), (7): Xaa is C or S
ASASPXXVSQDLEPISILYL

SEQ ID NO: 2722 - protein, 12 aa, Artificial Sequence
  Non-cyclic GFR-binding peptide
PTQLSPISVLYI

SEQ ID NO: 2723 - protein, 17 aa, Artificial Sequence
  Non-cyclic GFR-binding peptide
  MOD_RES (4), (4): Xaa is C or S
KPTXAPTKLEPISVLYL

SEQ ID NO: 2724 - protein, 10 aa, Artificial Sequence
  Non-cyclic GFR-binding peptide
KLSPISVLYI

SEQ ID NO: 2725 - protein, 11 aa, Artificial Sequence
  Non-cyclic GFR-binding peptide
QALEPISILYL

SEQ ID NO: 2726 - protein, 16 aa, Artificial Sequence
  Non-cyclic GFR-binding peptide
  MOD_RES (2), (3): Xaa is C or S
SXXVPARLSPISILYK

SEQ ID NO: 2727 - protein, 17 aa, Artificial Sequence
  Non-cyclic GFR-binding peptide
  MOD_RES (3), (4): Xaa is C or S
KAXXAPTKLEPISVLYL

SEQ ID NO: 2728 - protein, 10 aa, Artificial Sequence
  Non-cyclic GFR-binding peptide
RLEPISILYL

SEQ ID NO: 2729 - protein, 13 aa, Artificial Sequence
  Non-cyclic GFR-binding peptide
VPARLNAISILYF

SEQ ID NO: 2730 - protein, 20 aa, Artificial Sequence
  Non-cyclic GFR-binding peptide
  MOD_RES (6), (7): Xaa is C or S
SIPKAXXVPTELEPISMLYL

SEQ ID NO: 2731 - protein, 20 aa, Artificial Sequence
  Non-cyclic GFR-binding peptide
  MOD_RES (6), (7): Xaa is C or S
AAPASXXVPARLEPISILYL

SEQ ID NO: 2732 - protein, 20 aa, Artificial Sequence
  Non-cyclic GFR-binding peptide
  MOD_RES (7), (7): Xaa is C or S
HVTKPTXAPTKLEPISVLYL

SEQ ID NO: 2733 - protein, 15 aa, Artificial Sequence
  Non-cyclic GFR-binding peptide
  MOD_RES (1), (2): Xaa is C or S
XXVPARLSPISILYK

SEQ ID NO: 2734 - protein, 15 aa, Artificial Sequence
  Non-cyclic GFR-binding peptide
  MOD_RES (1), (2): Xaa is C or S
XXVPTELEPISMLYL

SEQ ID NO: 2735 - protein, 15 aa, Artificial Sequence
  Non-cyclic GFR-binding peptide
  MOD_RES (2), (2): Xaa is C or S
TXAPTKLEPISVLYL

SEQ ID NO: 2736 - protein, 15 aa, Artificial Sequence
  Non-cyclic GFR-binding peptide
  MOD_RES (1), (2): Xaa is C or S
XXVPQDLEPISILYL

SEQ ID NO: 2737 - protein, 14 aa, Artificial Sequence
  Non-cyclic GFR-binding peptide
  MOD_RES (1), (1): Xaa is C or S
XAPTQLEPISVLYL

SEQ ID NO: 2738 - protein, 11 aa, Artificial Sequence
  Non-cyclic GFR-binding peptide
QDLSPISILYI

SEQ ID NO: 2739 - protein, 18 aa, Artificial Sequence
  Non-cyclic GFR-binding peptide
  MOD_RES (4), (5): Xaa is C or S
PASXXVPARLNAISILYF

SEQ ID NO: 2740 - protein, 19 aa, Artificial Sequence
  Non-cyclic GFR-binding peptide
  MOD_RES (5), (6): Xaa is C or S
SAAPXXVPQALEPISILYL

SEQ ID NO: 2741 - protein, 11 aa, Artificial Sequence
  Non-cyclic GFR-binding peptide
TQLEPISVLYL

SEQ ID NO: 2742 - protein, 13 aa, Artificial Sequence
  Non-cyclic GFR-binding peptide
VPTKLEPISVLYL

SEQ ID NO: 2743 - protein, 11 aa, Artificial Sequence
  Non-cyclic GFR-binding peptide
TELSPISMLYI

SEQ ID NO: 2744 - protein, 13 aa, Artificial Sequence
  Non-cyclic GFR-binding peptide
VPARLSPISILYK

SEQ ID NO: 2745 - protein, 11 aa, Artificial Sequence
  Non-cyclic GFR-binding peptide
TKLSPISVLYI

SEQ ID NO: 2746 - protein, 16 aa, Artificial Sequence
  Non-cyclic GFR-binding peptide
  MOD_RES (2), (3): Xaa is C or S
PXXAPTKLEPISVLYL

SEQ ID NO: 2747 - protein, 17 aa, Artificial Sequence
  Non-cyclic GFR-binding peptide
  MOD_RES (3), (4): Xaa is C or S
KAXXVPTELSPISMLYI

SEQ ID NO: 2748 - protein, 15 aa, Artificial Sequence
  Non-cyclic GFR-binding peptide
  MOD_RES (1), (2): Xaa is C or S
XXVPTKLEPISVLYL

SEQ ID NO: 2749 - protein, 17 aa, Artificial Sequence
  Non-cyclic GFR-binding peptide
  MOD_RES (3), (4): Xaa is C or S
APXXVPQALSPISILYI

SEQ ID NO: 2750 - protein, 15 aa, Artificial Sequence
  Non-cyclic GFR-binding peptide
  MOD_RES (1), (2): Xaa is C or S
XXVPARLNAISILYF

SEQ ID NO: 2751 - protein, 9 aa, Artificial Sequence
  Non-cyclic GFR-binding peptide
LEPISMLYL

SEQ ID NO: 2752 - protein, 18 aa, Artificial Sequence
  Non-cyclic GFR-binding peptide
  MOD_RES (4), (5): Xaa is C or S
GKAXXVPTKLSPISVLYI

SEQ ID NO: 2753 - protein, 19 aa, Artificial Sequence
  Non-cyclic GFR-binding peptide
  MOD_RES (5), (6): Xaa is C or S
SASPXXVPQDLEPISILYL

SEQ ID NO: 2754 - protein, 20 aa, Artificial Sequence
  Non-cyclic GFR-binding peptide
  MOD_RES (6), (7): Xaa is C or S
KVGKAXXVPTKLEPISVLYL

SEQ ID NO: 2755 - protein, 20 aa, Artificial Sequence
  Non-cyclic GFR-binding peptide
  MOD_RES (6), (7): Xaa is C or S
TVPKPXXAPTQLSPISVLYI

SEQ ID NO: 2756 - protein, 17 aa, Artificial Sequence
  Non-cyclic GFR-binding peptide
  MOD_RES (3), (4): Xaa is C or S
APXXVPQALEPISILYL

SEQ ID NO: 2757 - protein, 18 aa, Artificial Sequence
  Non-cyclic GFR-binding peptide
  MOD_RES (4), (5): Xaa is C or S
ASPXXVPQDLSPISILYI

SEQ ID NO: 2758 - protein, 14 aa, Artificial Sequence
  Non-cyclic GFR-binding peptide
  MOD_RES (1), (1): Xaa is C or S
XVPTKLSPISVLYI

SEQ ID NO: 2759 - protein, 17 aa, Artificial Sequence
  Non-cyclic GFR-binding peptide
  MOD_RES (3), (4): Xaa is C or S
SPXXVPQDLSPISILYI

SEQ ID NO: 2760 - protein, 16 aa, Artificial Sequence
  Non-cyclic GFR-binding peptide
  MOD_RES (2), (3): Xaa is C or S
PXXVPQALSPISILYI

SEQ ID NO: 2761 - protein, 20 aa, Artificial Sequence
  Non-cyclic GFR-binding peptide
  MOD_RES (6), (7): Xaa is C or S
AVPKAXXAPTKLSPISVLYI

SEQ ID NO: 2762 - protein, 16 aa, Artificial Sequence
  Non-cyclic GFR-binding peptide
  MOD_RES (2), (3): Xaa is C or S
PXXAPTQLEPISVLYL

SEQ ID NO: 2763 - protein, 20 aa, Artificial Sequence
  Non-cyclic GFR-binding peptide
  MOD_RES (6), (7): Xaa is C or S
TVPKPXXAPTQLEPISVLYL

SEQ ID NO: 2764 - protein, 19 aa, Artificial Sequence
  Non-cyclic GFR-binding peptide
  MOD_RES (5), (6): Xaa is C or S
VPKPXXAPTQLEPISVLYL

SEQ ID NO: 2765 - protein, 19 aa, Artificial Sequence
  Non-cyclic GFR-binding peptide
  MOD_RES (5), (6): Xaa is C or S
SASPXXVSQDLSPISILYI

SEQ ID NO: 2766 - protein, 17 aa, Artificial Sequence
  Non-cyclic GFR-binding peptide
  MOD_RES (3), (4): Xaa is C or S
KPXXAPTKLEPISVLYL

SEQ ID NO: 2767 - protein, 11 aa, Artificial Sequence
  Non-cyclic GFR-binding peptide
TKLEPISVLYL

SEQ ID NO: 2768 - protein, 18 aa, Artificial Sequence
  Non-cyclic GFR-binding peptide
  MOD_RES (4), (5): Xaa is C or S
ASPXXVPQDLEPISILYL

SEQ ID NO: 2769 - protein, 20 aa, Artificial Sequence
  Non-cyclic GFR-binding peptide
  MOD_RES (6), (7): Xaa is C or S
ASAAPXXVPQALEPISILYL

SEQ ID NO: 2770 - protein, 13 aa, Artificial Sequence
  Non-cyclic GFR-binding peptide
VPTKLNAISILYF

SEQ ID NO: 2771 - protein, 20 aa, Artificial Sequence
  Non-cyclic GFR-binding peptide
  MOD_RES (6), (7): Xaa is C or S
KVGKAXXVPTKLSPISVLYI

SEQ ID NO: 2772 - protein, 15 aa, Artificial Sequence
  Non-cyclic GFR-binding peptide
  MOD_RES (1), (2): Xaa is C or S
XXVPTKLNAISILYF

SEQ ID NO: 2773 - protein, 17 aa, Artificial Sequence
  Non-cyclic GFR-binding peptide
  MOD_RES (3), (4): Xaa is C or S
KAXXVPTELEPISMLYL

SEQ ID NO: 2774 - protein, 12 aa, Artificial Sequence
  Non-cyclic GFR-binding peptide
PARLSPISILYK

SEQ ID NO: 2775 - protein, 15 aa, Artificial Sequence
  Non-cyclic GFR-binding peptide
  MOD_RES (2), (2): Xaa is C or S
TXAPTKLSPISVLYI

SEQ ID NO: 2776 - protein, 12 aa, Artificial Sequence
  Non-cyclic GFR-binding peptide
PTELSPISMLYI

SEQ ID NO: 2777 - protein, 9 aa, Artificial Sequence
  Non-cyclic GFR-binding peptide
LSPISMLYI

SEQ ID NO: 2778 - protein, 13 aa, Artificial Sequence
  Non-cyclic GFR-binding peptide
APTKLEPISVLYL

SEQ ID NO: 2779 - protein, 10 aa, Artificial Sequence
  Non-cyclic GFR-binding peptide
KLSPISILYK

SEQ ID NO: 2780 - protein, 10 aa, Artificial Sequence
  Non-cyclic GFR-binding peptide
KLSPISILYI

SEQ ID NO: 2781 - protein, 11 aa, Artificial Sequence
  Non-cyclic GFR-binding peptide
ARLEPISILYL

SEQ ID NO: 2782 - protein, 15 aa, Artificial Sequence
  Non-cyclic GFR-binding peptide
  MOD_RES (1), (2): Xaa is C or S
XXVPTELSPISMLYI

SEQ ID NO: 2783 - protein, 20 aa, Artificial Sequence
  Non-cyclic GFR-binding peptide
  MOD_RES (6), (7): Xaa is C or S
ASASPXXVPQDLSPISILYI

SEQ ID NO: 2784 - protein, 17 aa, Artificial Sequence
  Non-cyclic GFR-binding peptide
  MOD_RES (3), (4): Xaa is C or S
KAXXVPTKLEPISVLYL

SEQ ID NO: 2785 - protein, 14 aa, Artificial Sequence
  Non-cyclic GFR-binding peptide
  MOD_RES (1), (1): Xaa is C or S
XVPQALEPISILYL

SEQ ID NO: 2786 - protein, 14 aa, Artificial Sequence
  Non-cyclic GFR-binding peptide
  MOD_RES (1), (1): Xaa is C or S
XVPTELSPISMLYI

SEQ ID NO: 2787 - protein, 16 aa, Artificial Sequence
  Non-cyclic GFR-binding peptide
  MOD_RES (2), (3): Xaa is C or S
PXXVSQDLSPISILYI

SEQ ID NO: 2788 - protein, 14 aa, Artificial Sequence
  Non-cyclic GFR-binding peptide
  MOD_RES (1), (1): Xaa is C or S
XAPTKLEPISVLYL

SEQ ID NO: 2789 - protein, 18 aa, Artificial Sequence
  Non-cyclic GFR-binding peptide
  MOD_RES (5), (5): Xaa is C or S
TKPTXAPTKLEPISVLYL

SEQ ID NO: 2790 - protein, 18 aa, Artificial Sequence
  Non-cyclic GFR-binding peptide
  MOD_RES (4), (5): Xaa is C or S
SKAXXVPTKLSPISILYK

SEQ ID NO: 2791 - protein, 18 aa, Artificial Sequence
  Non-cyclic GFR-binding peptide
  MOD_RES (4), (5): Xaa is C or S
SKAXXVPTKLSPISILYI

SEQ ID NO: 2792 - protein, 17 aa, Artificial Sequence
  Non-cyclic GFR-binding peptide
  MOD_RES (3), (4): Xaa is C or S
KPXXAPTQLEPISVLYL

SEQ ID NO: 2793 - protein, 12 aa, Artificial Sequence
  Non-cyclic GFR-binding peptide
PQDLEPISILYL

SEQ ID NO: 2794 - protein, 14 aa, Artificial Sequence
  Non-cyclic GFR-binding peptide
  MOD_RES (1), (1): Xaa is C or S
XVPARLSPISILYK

SEQ ID NO: 2795 - protein, 12 aa, Artificial Sequence
  Non-cyclic GFR-binding peptide
PTKLSPISVLYI

SEQ ID NO: 2796 - protein, 20 aa, Artificial Sequence
  Non-cyclic GFR-binding peptide
  MOD_RES (6), (7): Xaa is C or S
KIPKAXXVPTELEPISMLYL

SEQ ID NO: 2797 - protein, 16 aa, Artificial Sequence
  Non-cyclic GFR-binding peptide
  MOD_RES (2), (3): Xaa is C or S
AXXVPTKLEPISVLYL

SEQ ID NO: 2798 - protein, 16 aa, Artificial Sequence
  Non-cyclic GFR-binding peptide
  MOD_RES (2), (3): Xaa is C or S
AXXVPTELEPISMLYL

SEQ ID NO: 2799 - protein, 17 aa, Artificial Sequence
  Non-cyclic GFR-binding peptide
  MOD_RES (3), (4): Xaa is C or S
KAXXVPTKLNAISILYF

SEQ ID NO: 2800 - protein, 18 aa, Artificial Sequence
  Non-cyclic GFR-binding peptide
  MOD_RES (4), (5): Xaa is C or S
PKPXXAPTQLEPISVLYL

SEQ ID NO: 2801 - protein, 20 aa, Artificial Sequence
  Non-cyclic GFR-binding peptide
  MOD_RES (6), (7): Xaa is C or S
AAPASXXVPARLSPISILYK

SEQ ID NO: 2802 - protein, 14 aa, Artificial Sequence
  Non-cyclic GFR-binding peptide
  MOD_RES (1), (1): Xaa is C or S
XVPQDLEPISILYL

SEQ ID NO: 2803 - protein, 13 aa, Artificial Sequence
  Non-cyclic GFR-binding peptide
APTQLEPISVLYL

SEQ ID NO: 2804 - protein, 16 aa, Artificial Sequence
  Non-cyclic GFR-binding peptide
  MOD_RES (2), (3): Xaa is C or S
SXXVPARLEPISILYL

SEQ ID NO: 2805 - protein, 15 aa, Artificial Sequence
  Non-cyclic GFR-binding peptide
  MOD_RES (1), (2): Xaa is C or S
XXAPTQLEPISVLYL

SEQ ID NO: 2806 - protein, 19 aa, Artificial Sequence
  Non-cyclic GFR-binding peptide
  MOD_RES (5), (6): Xaa is C or S
VPKAXXAPTKLEPISVLYL

SEQ ID NO: 2807 - protein, 11 aa, Artificial Sequence
  Non-cyclic GFR-binding peptide
TKLNAISILYF

SEQ ID NO: 2808 - protein, 19 aa, Artificial Sequence
  Non-cyclic GFR-binding peptide
  MOD_RES (6), (6): Xaa is C or S
VTKPTXAPTKLEPISVLYL

SEQ ID NO: 2809 - protein, 12 aa, Artificial Sequence
  Non-cyclic GFR-binding peptide
PTKLSPISILYI

SEQ ID NO: 2810 - protein, 17 aa, Artificial Sequence
  Non-cyclic GFR-binding peptide
  MOD_RES (3), (4): Xaa is C or S
SPXXVSQDLSPISILYI

SEQ ID NO: 2811 - protein, 20 aa, Artificial Sequence
  Non-cyclic GFR-binding peptide
  MOD_RES (6), (7): Xaa is C or S
KASKAXXVPTKLSPISILYK

SEQ ID NO: 2812 - protein, 20 aa, Artificial Sequence
  Non-cyclic GFR-binding peptide
  MOD_RES (6), (7): Xaa is C or S
KASKAXXVPTKLSPISILYI

SEQ ID NO: 2813 - protein, 13 aa, Artificial Sequence
  Non-cyclic GFR-binding peptide
VPARLEPISILYL

SEQ ID NO: 2814 - protein, 15 aa, Artificial Sequence
  Non-cyclic GFR-binding peptide
  MOD_RES (1), (2): Xaa is C or S
XXAPTKLSPISVLYI

SEQ ID NO: 2815 - protein, 20 aa, Artificial Sequence
  Non-cyclic GFR-binding peptide
  MOD_RES (6), (7): Xaa is C or S
AAPASXXVPARLNAISILYF

SEQ ID NO: 2816 - protein, 19 aa, Artificial Sequence
  Non-cyclic GFR-binding peptide
  MOD_RES (5), (6): Xaa is C or S
APASXXVPARLEPISILYL

SEQ ID NO: 2817 - protein, 16 aa, Artificial Sequence
  Non-cyclic GFR-binding peptide
  MOD_RES (2), (3): Xaa is C or S
PXXAPTKLSPISVLYI

SEQ ID NO: 2818 - protein, 19 aa, Artificial Sequence
  Non-cyclic GFR-binding peptide
  MOD_RES (5), (6): Xaa is C or S
SAAPXXVPQALSPISILYI

SEQ ID NO: 2819 - protein, 18 aa, Artificial Sequence
  Non-cyclic GFR-binding peptide
  MOD_RES (4), (5): Xaa is C or S
PKAXXVPTELEPISMLYL

SEQ ID NO: 2820 - protein, 18 aa, Artificial Sequence
  Non-cyclic GFR-binding peptide
  MOD_RES (4), (5): Xaa is C or S
ASPXXVSQDLEPISILYL

SEQ ID NO: 2821 - protein, 19 aa, Artificial Sequence
  Non-cyclic GFR-binding peptide
  MOD_RES (5), (6): Xaa is C or S
IPKAXXVPTELSPISMLYI

SEQ ID NO: 2822 - protein, 13 aa, Artificial Sequence
  Non-cyclic GFR-binding peptide
VPQDLSPISILYI

SEQ ID NO: 2823 - protein, 10 aa, Artificial Sequence
  Non-cyclic GFR-binding peptide
ELEPISMLYL

SEQ ID NO: 2824 - protein, 17 aa, Artificial Sequence
  Non-cyclic GFR-binding peptide
  MOD_RES (3), (4): Xaa is C or S
ASXXVPARLSPISILYK

SEQ ID NO: 2825 - protein, 14 aa, Artificial Sequence
  Non-cyclic GFR-binding peptide
  MOD_RES (1), (1): Xaa is C or S
XAPTQLSPISVLYI

SEQ ID NO: 2826 - protein, 12 aa, Artificial Sequence
  Non-cyclic GFR-binding peptide
PQALEPISILYL

SEQ ID NO: 2827 - protein, 12 aa, Artificial Sequence
  Non-cyclic GFR-binding peptide
PTKLSPISILYK

SEQ ID NO: 2828 - protein, 16 aa, Artificial Sequence
  Non-cyclic GFR-binding peptide
  MOD_RES (2), (3): Xaa is C or S
AXXVPTELSPISMLYI

SEQ ID NO: 2829 - protein, 15 aa, Artificial Sequence
  Non-cyclic GFR-binding peptide
  MOD_RES (1), (2): Xaa is C or S
XXVPTKLSPISVLYI

SEQ ID NO: 2830 - protein, 11 aa, Artificial Sequence
  Non-cyclic GFR-binding peptide
ARLSPISILYK

SEQ ID NO: 2831 - protein, 14 aa, Artificial Sequence
  Non-cyclic GFR-binding peptide
  MOD_RES (1), (1): Xaa is C or S
XVSQDLSPISILYI

SEQ ID NO: 2832 - protein, 13 aa, Artificial Sequence
  Non-cyclic GFR-binding peptide
VPTELSPISMLYI

SEQ ID NO: 2833 - protein, 18 aa, Artificial Sequence
  Non-cyclic GFR-binding peptide
  MOD_RES (4), (5): Xaa is C or S
PKPXXAPTKLEPISVLYL

SEQ ID NO: 2834 - protein, 20 aa, Artificial Sequence
  Non-cyclic GFR-binding peptide
  MOD_RES (6), (7): Xaa is C or S
SIPKAXXVPTELSPISMLYI

SEQ ID NO: 2835 - protein, 13 aa, Artificial Sequence
  Non-cyclic GFR-binding peptide
VPTKLSPISVLYI

SEQ ID NO: 2836 - protein, 19 aa, Artificial Sequence
  Non-cyclic GFR-binding peptide
  MOD_RES (5), (6): Xaa is C or S
VPKAXXAPTKLSPISVLYI

SEQ ID NO: 2837 - protein, 18 aa, Artificial Sequence
  Non-cyclic GFR-binding peptide
  MOD_RES (4), (5): Xaa is C or S
GKAXXVPTKLEPISVLYL

SEQ ID NO: 2838 - protein, 11 aa, Artificial Sequence
  Non-cyclic GFR-binding peptide
ARLNAISILYF

SEQ ID NO: 2839 - protein, 19 aa, Artificial Sequence
  Non-cyclic GFR-binding peptide
  MOD_RES (5), (6): Xaa is C or S
SASPXXVPQDLSPISILYI

SEQ ID NO: 2840 - protein, 16 aa, Artificial Sequence
  Non-cyclic GFR-binding peptide
  MOD_RES (2), (3): Xaa is C or S
AXXVPTKLSPISILYI

SEQ ID NO: 2841 - protein, 20 aa, Artificial Sequence
  Non-cyclic GFR-binding peptide
  MOD_RES (6), (7): Xaa is C or S
KASKAXXVPTKLNAISILYF

SEQ ID NO: 2842 - protein, 16 aa, Artificial Sequence
  Non-cyclic GFR-binding peptide
  MOD_RES (2), (3): Xaa is C or S
AXXVPTKLSPISILYK

SEQ ID NO: 2843 - protein, 20 aa, Artificial Sequence
  Non-cyclic GFR-binding peptide
  MOD_RES (6), (7): Xaa is C or S
YVPKPXXAPTKLSPISVLYI

SEQ ID NO: 2844 - protein, 13 aa, Artificial Sequence
  Non-cyclic GFR-binding peptide
VPQALEPISILYL

SEQ ID NO: 2845 - protein, 16 aa, Artificial Sequence
  Non-cyclic GFR-binding peptide
  MOD_RES (2), (3): Xaa is C or S
AXXVPTKLNAISILYF

SEQ ID NO: 2846 - protein, 11 aa, Artificial Sequence
  Non-cyclic GFR-binding peptide
TELEPISMLYL

SEQ ID NO: 2847 - protein, 15 aa, Artificial Sequence
  Non-cyclic GFR-binding peptide
  MOD_RES (1), (2): Xaa is C or S
XXVPARLEPISILYL

SEQ ID NO: 2848 - protein, 12 aa, Artificial Sequence
  Non-cyclic GFR-binding peptide
PARLEPISILYL

SEQ ID NO: 2849 - protein, 18 aa, Artificial Sequence
  Non-cyclic GFR-binding peptide
  MOD_RES (4), (5): Xaa is C or S
PKAXXAPTKLEPISVLYL

SEQ ID NO: 2850 - protein, 11 aa, Artificial Sequence
  Non-cyclic GFR-binding peptide
TQLSPISVLYI

SEQ ID NO: 2851 - protein, 19 aa, Artificial Sequence
  Non-cyclic GFR-binding peptide
  MOD_RES (5), (6): Xaa is C or S
ASKAXXVPTKLSPISILYK

SEQ ID NO: 2852 - protein, 19 aa, Artificial Sequence
  Non-cyclic GFR-binding peptide
  MOD_RES (5), (6): Xaa is C or S
ASKAXXVPTKLSPISILYI

SEQ ID NO: 2853 - protein, 17 aa, Artificial Sequence
  Non-cyclic GFR-binding peptide
  MOD_RES (3), (4): Xaa is C or S
ASXXVPARLNAISILYF

SEQ ID NO: 2854 - protein, 19 aa, Artificial Sequence
  Non-cyclic GFR-binding peptide
  MOD_RES (5), (6): Xaa is C or S
VPKPXXAPTQLSPISVLYI

SEQ ID NO: 2855 - protein, 11 aa, Artificial Sequence
  Non-cyclic GFR-binding peptide
QDLEPISILYL

SEQ ID NO: 2856 - protein, 19 aa, Artificial Sequence
  Non-cyclic GFR-binding peptide
  MOD_RES (5), (6): Xaa is C or S
ASKAXXVPTKLNAISILYF

SEQ ID NO: 2857 - protein, 12 aa, Artificial Sequence
  Non-cyclic GFR-binding peptide
SQDLEPISILYL

SEQ ID NO: 2858 - protein, 16 aa, Artificial Sequence
  Non-cyclic GFR-binding peptide
  MOD_RES (2), (3): Xaa is C or S
AXXAPTKLSPISVLYI

SEQ ID NO: 2859 - protein, 9 aa, Artificial Sequence
  Non-cyclic GFR-binding peptide
LSPISVLYI

SEQ ID NO: 2860 - protein, 12 aa, Artificial Sequence
  Non-cyclic GFR-binding peptide
PTKLNAISILYF

SEQ ID NO: 2861 - protein, 16 aa, Artificial Sequence
  Non-cyclic GFR-binding peptide
  MOD_RES (3), (3): Xaa is C or S
PTXAPTKLSPISVLYI

SEQ ID NO: 2862 - protein, 17 aa, Artificial Sequence
  Non-cyclic GFR-binding peptide
  MOD_RES (3), (4): Xaa is C or S
KAXXVPTKLSPISVLYI

SEQ ID NO: 2863 - protein, 19 aa, Artificial Sequence
  Non-cyclic GFR-binding peptide
  MOD_RES (5), (6): Xaa is C or S
VPKPXXAPTKLSPISVLYI

SEQ ID NO: 2864 - protein, 10 aa, Artificial Sequence
  Non-cyclic GFR-binding peptide
ALEPISILYL

SEQ ID NO: 2865 - protein, 16 aa, Artificial Sequence
  Non-cyclic GFR-binding peptide
  MOD_RES (2), (3): Xaa is C or S
PXXVPQDLSPISILYI

SEQ ID NO: 2866 - protein, 10 aa, Artificial Sequence
  Non-cyclic GFR-binding peptide
QLSPISVLYI

SEQ ID NO: 2867 - protein, 15 aa, Artificial Sequence
  Non-cyclic GFR-binding peptide
  MOD_RES (1), (2): Xaa is C or S
XXVPQALEPISILYL

SEQ ID NO: 2868 - protein, 13 aa, Artificial Sequence
  Non-cyclic GFR-binding peptide
VSQDLSPISILYI

SEQ ID NO: 2869 - protein, 15 aa, Artificial Sequence
  Non-cyclic GFR-binding peptide
  MOD_RES (1), (2): Xaa is C or S
XXVSQDLSPISILYI

SEQ ID NO: 2870 - protein, 18 aa, Artificial Sequence
  Non-cyclic GFR-binding peptide
  MOD_RES (4), (5): Xaa is C or S
PASXXVPARLSPISILYK

SEQ ID NO: 2871 - protein, 20 aa, Artificial Sequence
  Non-cyclic GFR-binding peptide
  MOD_RES (6), (7): Xaa is C or S
ASASPXXVSQDLSPISILYI

SEQ ID NO: 2872 - protein, 11 aa, Artificial Sequence
  Non-cyclic GFR-binding peptide
QALSPISILYI

SEQ ID NO: 2873 - protein, 17 aa, Artificial Sequence
  Non-cyclic GFR-binding peptide
  MOD_RES (4), (4): Xaa is C or S
KPTXAPTKLSPISVLYI

SEQ ID NO: 2874 - protein, 20 aa, Artificial Sequence
  Non-cyclic GFR-binding peptide
  MOD_RES (6), (7): Xaa is C or S
AVPKAXXAPTKLEPISVLYL

SEQ ID NO: 2875 - protein, 16 aa, Artificial Sequence
  Non-cyclic GFR-binding peptide
  MOD_RES (2), (3): Xaa is C or S
PXXAPTQLSPISVLYI

SEQ ID NO: 2876 - protein, 15 aa, Artificial Sequence
  Non-cyclic GFR-binding peptide
  MOD_RES (1), (2): Xaa is C or S
XXVPQALSPISILYI

SEQ ID NO: 2877 - protein, 18 aa, Artificial Sequence
  Non-cyclic GFR-binding peptide
  MOD_RES (4), (5): Xaa is C or S
AAPXXVPQALEPISILYL

SEQ ID NO: 2878 - protein, 12 aa, Artificial Sequence
  Non-cyclic GFR-binding peptide
PTKLEPISVLYL

SEQ ID NO: 2879 - protein, 15 aa, Artificial Sequence
  Non-cyclic GFR-binding peptide
  MOD_RES (1), (2): Xaa is C or S
XXVPTKLSPISILYI

SEQ ID NO: 2880 - protein, 15 aa, Artificial Sequence
  Non-cyclic GFR-binding peptide
  MOD_RES (1), (2): Xaa is C or S
XXVPTKLSPISILYK

SEQ ID NO: 2881 - protein, 17 aa, Artificial Sequence
  Non-cyclic GFR-binding peptide
  MOD_RES (3), (4): Xaa is C or S
SPXXVPQDLEPISILYL

SEQ ID NO: 2882 - protein, 14 aa, Artificial Sequence
  Non-cyclic GFR-binding peptide
  MOD_RES (1), (1): Xaa is C or S
XVPARLEPISILYL

SEQ ID NO: 2883 - protein, 18 aa, Artificial Sequence
  Non-cyclic GFR-binding peptide
  MOD_RES (4), (5): Xaa is C or S
AAPXXVPQALSPISILYI

SEQ ID NO: 2884 - protein, 14 aa, Artificial Sequence
  Non-cyclic GFR-binding peptide
  MOD_RES (1), (1): Xaa is C or S
XVPTELEPISMLYL

SEQ ID NO: 2885 - protein, 16 aa, Artificial Sequence
  Non-cyclic GFR-binding peptide
  MOD_RES (2), (3): Xaa is C or S
PXXVSQDLEPISILYL

SEQ ID NO: 2886 - protein, 14 aa, Artificial Sequence
  Non-cyclic GFR-binding peptide
  MOD_RES (1), (1): Xaa is C or S
XAPTKLSPISVLYI

SEQ ID NO: 2887 - protein, 16 aa, Artificial Sequence
  Non-cyclic GFR-binding peptide
  MOD_RES (2), (3): Xaa is C or S
PXXVPQALEPISILYL

SEQ ID NO: 2888 - protein, 18 aa, Artificial Sequence
  Non-cyclic GFR-binding peptide
  MOD_RES (4), (5): Xaa is C or S
PKPXXAPTQLSPISVLYI

SEQ ID NO: 2889 - protein, 20 aa, Artificial Sequence
  Non-cyclic GFR-binding peptide
  MOD_RES (6), (7): Xaa is C or S
ASASPXXVPQDLEPISILYL

SEQ ID NO: 2890 - protein, 10 aa, Artificial Sequence
  Non-cyclic GFR-binding peptide
KLNAISILYF

SEQ ID NO: 2891 - protein, 13 aa, Artificial Sequence
  Non-cyclic GFR-binding peptide
APTQLSPISVLYI

SEQ ID NO: 2892 - protein, 13 aa, Artificial Sequence
  Non-cyclic GFR-binding peptide
VPTKLSPISILYI

SEQ ID NO: 2893 - protein, 10 aa, Artificial Sequence
  Non-cyclic GFR-binding peptide
ALSPISILYI

SEQ ID NO: 2894 - protein, 14 aa, Artificial Sequence
  Non-cyclic GFR-binding peptide
  MOD_RES (1), (1): Xaa is C or S
XVPTKLEPISVLYL

SEQ ID NO: 2895 - protein, 13 aa, Artificial Sequence
  Non-cyclic GFR-binding peptide
VPTKLSPISILYK

SEQ ID NO: 2896 - protein, 16 aa, Artificial Sequence
  Non-cyclic GFR-binding peptide
  MOD_RES (2), (3): Xaa is C or S
AXXAPTKLEPISVLYL

SEQ ID NO: 2897 - protein, 10 aa, Artificial Sequence
  Non-cyclic GFR-binding peptide
RLSPISILYK

SEQ ID NO: 2898 - protein, 17 aa, Artificial Sequence
  Non-cyclic GFR-binding peptide
  MOD_RES (3), (4): Xaa is C or S
KAXXAPTKLSPISVLYI

SEQ ID NO: 2899 - protein, 13 aa, Artificial Sequence
  Non-cyclic GFR-binding peptide
VPQALSPISILYI

SEQ ID NO: 2900 - protein, 15 aa, Artificial Sequence
  Non-cyclic GFR-binding peptide
  MOD_RES (1), (2): Xaa is C or S
XXAPTQLSPISVLYI

SEQ ID NO: 2901 - protein, 12 aa, Artificial Sequence
  Non-cyclic GFR-binding peptide
PQDLSPISILYI

SEQ ID NO: 2902 - protein, 15 aa, Artificial Sequence
  Non-cyclic GFR-binding peptide
  MOD_RES (1), (2): Xaa is C or S
XXVSQDLEPISILYL

SEQ ID NO: 2903 - protein, 14 aa, Artificial Sequence
  Non-cyclic GFR-binding peptide
  MOD_RES (1), (1): Xaa is C or S
XVPQDLSPISILYI

SEQ ID NO: 2904 - protein, 13 aa, Artificial Sequence
  Non-cyclic GFR-binding peptide
VSQDLEPISILYL

SEQ ID NO: 2905 - protein, 18 aa, Artificial Sequence
  Non-cyclic GFR-binding peptide
  MOD_RES (4), (5): Xaa is C or S
PASXXVPARLEPISILYL

SEQ ID NO: 2906 - protein, 19 aa, Artificial Sequence
  Non-cyclic GFR-binding peptide
  MOD_RES (6), (6): Xaa is C or S
VTKPTXAPTKLSPISVLYI

SEQ ID NO: 2907 - protein, 18 aa, Artificial Sequence
  Non-cyclic GFR-binding peptide
  MOD_RES (5), (5): Xaa is C or S
TKPTXAPTKLSPISVLYI

SEQ ID NO: 2908 - protein, 18 aa, Artificial Sequence
  Non-cyclic GFR-binding peptide
  MOD_RES (4), (5): Xaa is C or S
PKAXXAPTKLSPISVLYI

SEQ ID NO: 2909 - protein, 10 aa, Artificial Sequence
  Non-cyclic GFR-binding peptide
QLEPISVLYL

SEQ ID NO: 2910 - protein, 15 aa, Artificial Sequence
  Non-cyclic GFR-binding peptide
  MOD_RES (1), (2): Xaa is C or S
XXVPQDLSPISILYI

SEQ ID NO: 2911 - protein, 20 aa, Artificial Sequence
  Non-cyclic GFR-binding peptide
  MOD_RES (6), (7): Xaa is C or S
ASAAPXXVPQALSPISILYI

SEQ ID NO: 2912 - protein, 20 aa, Artificial Sequence
  Non-cyclic GFR-binding peptide
  MOD_RES (6), (7): Xaa is C or S
KIPKAXXVPTELSPISMLYI

SEQ ID NO: 2913 - protein, 16 aa, Artificial Sequence
  Non-cyclic GFR-binding peptide
  MOD_RES (2), (3): Xaa is C or S
AXXVPTKLSPISVLYI

SEQ ID NO: 2914 - protein, 18 aa, Artificial Sequence
  Non-cyclic GFR-binding peptide
  MOD_RES (4), (5): Xaa is C or S
SKAXXVPTKLNAISILYF

SEQ ID NO: 2915 - protein, 12 aa, Artificial Sequence
  Non-cyclic GFR-binding peptide
SQDLSPISILYI

SEQ ID NO: 2916 - protein, 19 aa, Artificial Sequence
  Non-cyclic GFR-binding peptide
  MOD_RES (5), (6): Xaa is C or S
SASPXXVSQDLEPISILYL

SEQ ID NO: 2917 - protein, 17 aa, Artificial Sequence
  Non-cyclic GFR-binding peptide
  MOD_RES (3), (4): Xaa is C or S
KPXXAPTKLSPISVLYI

SEQ ID NO: 2918 - protein, 12 aa, Artificial Sequence
  Non-cyclic GFR-binding peptide
PTELEPISMLYL

SEQ ID NO: 2919 - protein, 17 aa, Artificial Sequence
  Non-cyclic GFR-binding peptide
  MOD_RES (3), (4): Xaa is C or S
KPXXAPTQLSPISVLYI

SEQ ID NO: 2920 - protein, 14 aa, Artificial Sequence
  Non-cyclic GFR-binding peptide
  MOD_RES (1), (1): Xaa is C or S
XVPARLNAISILYF

SEQ ID NO: 2921 - protein, 14 aa, Artificial Sequence
  Non-cyclic GFR-binding peptide
  MOD_RES (1), (1): Xaa is C or S
XVPQALSPISILYI

SEQ ID NO: 2922 - protein, 19 aa, Artificial Sequence
  Non-cyclic GFR-binding peptide
  MOD_RES (5), (6): Xaa is C or S
VGKAXXVPTKLSPISVLYI

SEQ ID NO: 2923 - protein, 18 aa, Artificial Sequence
  Non-cyclic GFR-binding peptide
  MOD_RES (4), (5): Xaa is C or S
PKPXXAPTKLSPISVLYI

SEQ ID NO: 2924 - protein, 19 aa, Artificial Sequence
  Non-cyclic GFR-binding peptide
  MOD_RES (5), (6): Xaa is C or S
IPKAXXVPTELEPISMLYL

SEQ ID NO: 2925 - protein, 10 aa, Artificial Sequence
  Non-cyclic GFR-binding peptide
DLSPISILYI

SEQ ID NO: 2926 - protein, 20 aa, Artificial Sequence
  Non-cyclic GFR-binding peptide
  MOD_RES (7), (7): Xaa is C or S
HVTKPTXAPTKLSPISVLYI

SEQ ID NO: 2927 - protein, 13 aa, Artificial Sequence
  Non-cyclic GFR-binding peptide
APTKLSPISVLYI

SEQ ID NO: 2928 - protein, 20 aa, Artificial Sequence
  Non-cyclic GFR-binding peptide
  MOD_RES (6), (7): Xaa is C or S
YVPKPXXAPTKLEPISVLYL

SEQ ID NO: 2929 - protein, 11 aa, Artificial Sequence
  Non-cyclic GFR-binding peptide
TKLSPISILYK

SEQ ID NO: 2930 - protein, 17 aa, Artificial Sequence
  Non-cyclic GFR-binding peptide
  MOD_RES (3), (4): Xaa is C or S
KAXXVPTKLSPISILYK

SEQ ID NO: 2931 - protein, 17 aa, Artificial Sequence
  Non-cyclic GFR-binding peptide
  MOD_RES (3), (4): Xaa is C or S
KAXXVPTKLSPISILYI

SEQ ID NO: 2932 - protein, 12 aa, Artificial Sequence
  Non-cyclic GFR-binding peptide
PTQLEPISVLYL

SEQ ID NO: 2933 - protein, 11 aa, Artificial Sequence
  Non-cyclic GFR-binding peptide
TKLSPISILYI

SEQ ID NO: 2934 - protein, 10 aa, Artificial Sequence
  Non-cyclic GFR-binding peptide
KLEPISVLYL

SEQ ID NO: 2935 - protein, 16 aa, Artificial Sequence
  Non-cyclic GFR-binding peptide
  MOD_RES (14), (15): Xaa is C or S
FYLMNIPSLETPVXXA

SEQ ID NO: 2936 - protein, 13 aa, Artificial Sequence
  Non-cyclic GFR-binding peptide
FYLVNIPSLKTPA

SEQ ID NO: 2937 - protein, 14 aa, Artificial Sequence
  Non-cyclic GFR-binding peptide
  MOD_RES (14), (14): Xaa is C or S
FYLINIPSLKTPVX

SEQ ID NO: 2938 - protein, 16 aa, Artificial Sequence
  Non-cyclic GFR-binding peptide
  MOD_RES (14), (15): Xaa is C or S
FYLINIPSLRAPVXXS

SEQ ID NO: 2939 - protein, 15 aa, Artificial Sequence
  Non-cyclic GFR-binding peptide
  MOD_RES (14), (15): Xaa is C or S
FYLMNIPSTKVPAXX

SEQ ID NO: 2940 - protein, 14 aa, Artificial Sequence
  Non-cyclic GFR-binding peptide
  MOD_RES (14), (14): Xaa is C or S
FYLVNIPSLQTPAX

SEQ ID NO: 2941 - protein, 19 aa, Artificial Sequence
  Non-cyclic GFR-binding peptide
  MOD_RES (14), (15): Xaa is C or S
FYLMNIPSLETPVXXAKPI

SEQ ID NO: 2942 - protein, 13 aa, Artificial Sequence
  Non-cyclic GFR-binding peptide
FYLINIPSLRTPV

SEQ ID NO: 2943 - protein, 20 aa, Artificial Sequence
  Non-cyclic GFR-binding peptide
  MOD_RES (14), (15): Xaa is C or S
FYLINIPSLRAPVXXSAPAA

SEQ ID NO: 2944 - protein, 13 aa, Artificial Sequence
  Non-cyclic GFR-binding peptide
FYLVNIPSLKTPV

SEQ ID NO: 2945 - protein, 17 aa, Artificial Sequence
  Non-cyclic GFR-binding peptide
  MOD_RES (14), (15): Xaa is C or S
FYLVNIPSLKTPAXXAK

SEQ ID NO: 2946 - protein, 10 aa, Artificial Sequence
  Non-cyclic GFR-binding peptide
FYLVNIPSLQ

SEQ ID NO: 2947 - protein, 10 aa, Artificial Sequence
  Non-cyclic GFR-binding peptide
FYLINIPSLR

SEQ ID NO: 2948 - protein, 10 aa, Artificial Sequence
  Non-cyclic GFR-binding peptide
FYLVNIPSLK

SEQ ID NO: 2949 - protein, 15 aa, Artificial Sequence
  Non-cyclic GFR-binding peptide
  MOD_RES (14), (15): Xaa is C or S
FYLMNIPSLETPVXX

SEQ ID NO: 2950 - protein, 16 aa, Artificial Sequence
  Non-cyclic GFR-binding peptide
  MOD_RES (14), (15): Xaa is C or S
FYLINIPSLRTPVXXT

SEQ ID NO: 2951 - protein, 14 aa, Artificial Sequence
  Non-cyclic GFR-binding peptide
  MOD_RES (14), (14): Xaa is C or S
FYLINIPSLRTPVX

SEQ ID NO: 2952 - protein, 17 aa, Artificial Sequence
  Non-cyclic GFR-binding peptide
  MOD_RES (14), (14): Xaa is C or S
FYLVNIPSLKTPAXTPK

SEQ ID NO: 2953 - protein, 20 aa, Artificial Sequence
  Non-cyclic GFR-binding peptide
  MOD_RES (14), (15): Xaa is C or S
FYLINIPSLKTPVXXAKSAK

SEQ ID NO: 2954 - protein, 11 aa, Artificial Sequence
  Non-cyclic GFR-binding peptide
FYLMNIPSLET

SEQ ID NO: 2955 - protein, 11 aa, Artificial Sequence
  Non-cyclic GFR-binding peptide
FYLINIPSLRA

SEQ ID NO: 2956 - protein, 19 aa, Artificial Sequence
  Non-cyclic GFR-binding peptide
  MOD_RES (14), (14): Xaa is C or S
FYLVNIPSLKTPAXTPKTV

SEQ ID NO: 2957 - protein, 13 aa, Artificial Sequence
  Non-cyclic GFR-binding peptide
FYLINIPSLKTPV

SEQ ID NO: 2958 - protein, 20 aa, Artificial Sequence
  Non-cyclic GFR-binding peptide
  MOD_RES (14), (15): Xaa is C or S
FYLMNIPSLETPVXXAKPIS

SEQ ID NO: 2959 - protein, 17 aa, Artificial Sequence
  Non-cyclic GFR-binding peptide
  MOD_RES (14), (15): Xaa is C or S
FYLINIPSLRTPVXXTP

SEQ ID NO: 2960 - protein, 13 aa, Artificial Sequence
  Non-cyclic GFR-binding peptide
FYLVNIPSLQTPA

SEQ ID NO: 2961 - protein, 9 aa, Artificial Sequence
  Non-cyclic GFR-binding peptide
FYLMNIPSL

SEQ ID NO: 2962 - protein, 16 aa, Artificial Sequence
  Non-cyclic GFR-binding peptide
  MOD_RES (14), (15): Xaa is C or S
FYLMNIPSTKVPAXXT

SEQ ID NO: 2963 - protein, 12 aa, Artificial Sequence
  Non-cyclic GFR-binding peptide
FYLINIPSLKTP

SEQ ID NO: 2964 - protein, 20 aa, Artificial Sequence
  Non-cyclic GFR-binding peptide
  MOD_RES (14), (15): Xaa is C or S
FYLVNIPSLQTPAXXPKPVT

SEQ ID NO: 2965 - protein, 20 aa, Artificial Sequence
  Non-cyclic GFR-binding peptide
  MOD_RES (14), (15): Xaa is C or S
FYLVNIPSLKTPVXXAKGVK

SEQ ID NO: 2966 - protein, 12 aa, Artificial Sequence
  Non-cyclic GFR-binding peptide
FYLMNIPSLETP

SEQ ID NO: 2967 - protein, 14 aa, Artificial Sequence
  Non-cyclic GFR-binding peptide
  MOD_RES (14), (14): Xaa is C or S
FYLVNIPSLKTPVX

SEQ ID NO: 2968 - protein, 18 aa, Artificial Sequence
  Non-cyclic GFR-binding peptide
  MOD_RES (14), (15): Xaa is C or S
FYLMNIPSLETPVXXAKP

SEQ ID NO: 2969 - protein, 16 aa, Artificial Sequence
  Non-cyclic GFR-binding peptide
  MOD_RES (14), (15): Xaa is C or S
FYLVNIPSLKTPAXXP

SEQ ID NO: 2970 - protein, 18 aa, Artificial Sequence
  Non-cyclic GFR-binding peptide
  MOD_RES (14), (14): Xaa is C or S
FYLVNIPSLKTPAXTPKT

SEQ ID NO: 2971 - protein, 15 aa, Artificial Sequence
  Non-cyclic GFR-binding peptide
  MOD_RES (14), (15): Xaa is C or S
FYLINIPSLRAPVXX

SEQ ID NO: 2972 - protein, 19 aa, Artificial Sequence
  Non-cyclic GFR-binding peptide
  MOD_RES (14), (15): Xaa is C or S
FYLVNIPSLKTPAXXAKPV

SEQ ID NO: 2973 - protein, 20 aa, Artificial Sequence
  Non-cyclic GFR-binding peptide
  MOD_RES (14), (15): Xaa is C or S
FYLMNIPSLETPVXXAKPIK

SEQ ID NO: 2974 - protein, 13 aa, Artificial Sequence
  Non-cyclic GFR-binding peptide
FYLMNIPSTKVPA

SEQ ID NO: 2975 - protein, 12 aa, Artificial Sequence
  Non-cyclic GFR-binding peptide
FYLMNIPSTKVP

SEQ ID NO: 2976 - protein, 17 aa, Artificial Sequence
  Non-cyclic GFR-binding peptide
  MOD_RES (14), (15): Xaa is C or S
FYLVNIPSLQTPAXXPK

SEQ ID NO: 2977 - protein, 11 aa, Artificial Sequence
  Non-cyclic GFR-binding peptide
FYLVNIPSLQT

SEQ ID NO: 2978 - protein, 14 aa, Artificial Sequence
  Non-cyclic GFR-binding peptide
  MOD_RES (14), (14): Xaa is C or S
FYLMNIPSLETPVX

SEQ ID NO: 2979 - protein, 18 aa, Artificial Sequence
  Non-cyclic GFR-binding peptide
  MOD_RES (14), (15): Xaa is C or S
FYLMNIPSTKVPAXXTSP

SEQ ID NO: 2980 - protein, 19 aa, Artificial Sequence
  Non-cyclic GFR-binding peptide
  MOD_RES (14), (15): Xaa is C or S
FYLVNIPSLQTPAXXPKPV

SEQ ID NO: 2981 - protein, 16 aa, Artificial Sequence
  Non-cyclic GFR-binding peptide
  MOD_RES (14), (15): Xaa is C or S
FYLVNIPSLKTPVXXA

SEQ ID NO: 2982 - protein, 10 aa, Artificial Sequence
  Non-cyclic GFR-binding peptide
FYLMNIPSTK

SEQ ID NO: 2983 - protein, 18 aa, Artificial Sequence
  Non-cyclic GFR-binding peptide
  MOD_RES (14), (15): Xaa is C or S
FYLINIPSLRTPVXXTPP

SEQ ID NO: 2984 - protein, 18 aa, Artificial Sequence
  Non-cyclic GFR-binding peptide
  MOD_RES (14), (15): Xaa is C or S
FYLVNIPSLQTPAXXPKP

SEQ ID NO: 2985 - protein, 18 aa, Artificial Sequence
  Non-cyclic GFR-binding peptide
  MOD_RES (14), (15): Xaa is C or S
FYLVNIPSLKTPAXXPKP

SEQ ID NO: 2986 - protein, 16 aa, Artificial Sequence
  Non-cyclic GFR-binding peptide
  MOD_RES (14), (15): Xaa is C or S
FYLVNIPSLKTPAXXA

SEQ ID NO: 2987 - protein, 18 aa, Artificial Sequence
  Non-cyclic GFR-binding peptide
  MOD_RES (14), (15): Xaa is C or S
FYLINIPSLKTPVXXAKS

SEQ ID NO: 2988 - protein, 13 aa, Artificial Sequence
  Non-cyclic GFR-binding peptide
FYLMNIPSLETPV

SEQ ID NO: 2989 - protein, 16 aa, Artificial Sequence
  Non-cyclic GFR-binding peptide
  MOD_RES (14), (15): Xaa is C or S
FYLINIPSLKTPVXXA

SEQ ID NO: 2990 - protein, 13 aa, Artificial Sequence
  Non-cyclic GFR-binding peptide
FYLINIPSLRAPV

SEQ ID NO: 2991 - protein, 11 aa, Artificial Sequence
  Non-cyclic GFR-binding peptide
FYLINIPSLRT

SEQ ID NO: 2992 - protein, 20 aa, Artificial Sequence
  Non-cyclic GFR-binding peptide
  MOD_RES (14), (15): Xaa is C or S
FYLVNIPSLKTPAXXPKPVH

SEQ ID NO: 2993 - protein, 15 aa, Artificial Sequence
  Non-cyclic GFR-binding peptide
  MOD_RES (14), (15): Xaa is C or S
FYLINIPSLRTPVXX

SEQ ID NO: 2994 - protein, 9 aa, Artificial Sequence
  Non-cyclic GFR-binding peptide
FYLVNIPSL

SEQ ID NO: 2995 - protein, 16 aa, Artificial Sequence
  Non-cyclic GFR-binding peptide
  MOD_RES (14), (14): Xaa is C or S
FYLVNIPSLKTPAXTP

SEQ ID NO: 2996 - protein, 15 aa, Artificial Sequence
  Non-cyclic GFR-binding peptide
  MOD_RES (14), (15): Xaa is C or S
FYLVNIPSLKTPVXX

SEQ ID NO: 2997 - protein, 12 aa, Artificial Sequence
  Non-cyclic GFR-binding peptide
FYLINIPSLRTP

SEQ ID NO: 2998 - protein, 15 aa, Artificial Sequence
  Non-cyclic GFR-binding peptide
  MOD_RES (14), (15): Xaa is C or S
FYLVNIPSLKTPAXX

SEQ ID NO: 2999 - protein, 11 aa, Artificial Sequence
  Non-cyclic GFR-binding peptide
FYLMNIPSTKV

SEQ ID NO: 3000 - protein, 17 aa, Artificial Sequence
  Non-cyclic GFR-binding peptide
  MOD_RES (14), (15): Xaa is C or S
FYLMNIPSLETPVXXAK

SEQ ID NO: 3001 - protein, 12 aa, Artificial Sequence
  Non-cyclic GFR-binding peptide
FYLVNIPSLQTP

SEQ ID NO: 3002 - protein, 15 aa, Artificial Sequence
  Non-cyclic GFR-binding peptide
  MOD_RES (14), (15): Xaa is C or S
FYLINIPSLKTPVXX

SEQ ID NO: 3003 - protein, 11 aa, Artificial Sequence
  Non-cyclic GFR-binding peptide
FYLINIPSLKT

SEQ ID NO: 3004 - protein, 12 aa, Artificial Sequence
  Non-cyclic GFR-binding peptide
FYLVNIPSLKTP

SEQ ID NO: 3005 - protein, 18 aa, Artificial Sequence
  Non-cyclic GFR-binding peptide
  MOD_RES (14), (15): Xaa is C or S
FYLVNIPSLKTPVXXAKG

SEQ ID NO: 3006 - protein, 15 aa, Artificial Sequence
  Non-cyclic GFR-binding peptide
  MOD_RES (14), (15): Xaa is C or S
FYLVNIPSLQTPAXX

SEQ ID NO: 3007 - protein, 19 aa, Artificial Sequence
  Non-cyclic GFR-binding peptide
  MOD_RES (14), (15): Xaa is C or S
FYLMNIPSTKVPAXXTSPV

SEQ ID NO: 3008 - protein, 9 aa, Artificial Sequence
  Non-cyclic GFR-binding peptide
FYLINIPSL

SEQ ID NO: 3009 - protein, 17 aa, Artificial Sequence
  Non-cyclic GFR-binding peptide
  MOD_RES (14), (15): Xaa is C or S
FYLMNIPSTKVPAXXTS

SEQ ID NO: 3010 - protein, 15 aa, Artificial Sequence
  Non-cyclic GFR-binding peptide
  MOD_RES (14), (14): Xaa is C or S
FYLVNIPSLKTPAXT

SEQ ID NO: 3011 - protein, 12 aa, Artificial Sequence
  Non-cyclic GFR-binding peptide
FYLINIPSLRAP

SEQ ID NO: 3012 - protein, 16 aa, Artificial Sequence
  Non-cyclic GFR-binding peptide
  MOD_RES (14), (15): Xaa is C or S
FYLVNIPSLQTPAXXP

SEQ ID NO: 3013 - protein, 20 aa, Artificial Sequence
  Non-cyclic GFR-binding peptide
  MOD_RES (14), (15): Xaa is C or S
FYLVNIPSLKTPAXXPKPVY

SEQ ID NO: 3014 - protein, 10 aa, Artificial Sequence
  Non-cyclic GFR-binding peptide
FYLMNIPSLE

SEQ ID NO: 3015 - protein, 18 aa, Artificial Sequence
  Non-cyclic GFR-binding peptide
  MOD_RES (14), (15): Xaa is C or S
FYLVNIPSLKTPAXXAKP

SEQ ID NO: 3016 - protein, 18 aa, Artificial Sequence
  Non-cyclic GFR-binding peptide
  MOD_RES (14), (15): Xaa is C or S
FYLINIPSLRAPVXXSAP

SEQ ID NO: 3017 - protein, 19 aa, Artificial Sequence
  Non-cyclic GFR-binding peptide
  MOD_RES (14), (15): Xaa is C or S
FYLINIPSLRAPVXXSAPA

SEQ ID NO: 3018 - protein, 14 aa, Artificial Sequence
  Non-cyclic GFR-binding peptide
  MOD_RES (14), (14): Xaa is C or S
FYLMNIPSTKVPAX

SEQ ID NO: 3019 - protein, 17 aa, Artificial Sequence
  Non-cyclic GFR-binding peptide
  MOD_RES (14), (15): Xaa is C or S
FYLINIPSLKTPVXXAK

SEQ ID NO: 3020 - protein, 10 aa, Artificial Sequence
  Non-cyclic GFR-binding peptide
FYLINIPSLK

SEQ ID NO: 3021 - protein, 11 aa, Artificial Sequence
  Non-cyclic GFR-binding peptide
FYLVNIPSLKT

SEQ ID NO: 3022 - protein, 17 aa, Artificial Sequence
  Non-cyclic GFR-binding peptide
  MOD_RES (14), (15): Xaa is C or S
FYLVNIPSLKTPAXXPK

SEQ ID NO: 3023 - protein, 20 aa, Artificial Sequence
  Non-cyclic GFR-binding peptide
  MOD_RES (14), (15): Xaa is C or S
FYLINIPSLRTPVXXTPPTS

SEQ ID NO: 3024 - protein, 9 aa, Artificial Sequence
  Non-cyclic GFR-binding peptide
FYLMNIPST

SEQ ID NO: 3025 - protein, 17 aa, Artificial Sequence
  Non-cyclic GFR-binding peptide
  MOD_RES (14), (15): Xaa is C or S
FYLINIPSLRAPVXXSA

SEQ ID NO: 3026 - protein, 19 aa, Artificial Sequence
  Non-cyclic GFR-binding peptide
  MOD_RES (14), (15): Xaa is C or S
FYLVNIPSLKTPVXXAKGV

SEQ ID NO: 3027 - protein, 14 aa, Artificial Sequence
  Non-cyclic GFR-binding peptide
  MOD_RES (14), (14): Xaa is C or S
FYLVNIPSLKTPAX

SEQ ID NO: 3028 - protein, 20 aa, Artificial Sequence
  Non-cyclic GFR-binding peptide
  MOD_RES (14), (14): Xaa is C or S
FYLVNIPSLKTPAXTPKTVH

SEQ ID NO: 3029 - protein, 20 aa, Artificial Sequence
  Non-cyclic GFR-binding peptide
  MOD_RES (14), (15): Xaa is C or S
FYLVNIPSLKTPAXXAKPVA

SEQ ID NO: 3030 - protein, 19 aa, Artificial Sequence
  Non-cyclic GFR-binding peptide
  MOD_RES (14), (15): Xaa is C or S
FYLINIPSLRTPVXXTPPT

SEQ ID NO: 3031 - protein, 14 aa, Artificial Sequence
  Non-cyclic GFR-binding peptide
  MOD_RES (14), (14): Xaa is C or S
FYLINIPSLRAPVX

SEQ ID NO: 3032 - protein, 17 aa, Artificial Sequence
  Non-cyclic GFR-binding peptide
  MOD_RES (14), (15): Xaa is C or S
FYLVNIPSLKTPVXXAK

SEQ ID NO: 3033 - protein, 19 aa, Artificial Sequence
  Non-cyclic GFR-binding peptide
  MOD_RES (14), (15): Xaa is C or S
FYLVNIPSLKTPAXXPKPV

SEQ ID NO: 3034 - protein, 19 aa, Artificial Sequence
  Non-cyclic GFR-binding peptide
  MOD_RES (14), (15): Xaa is C or S
FYLINIPSLKTPVXXAKSA

SEQ ID NO: 3035 - protein, 20 aa, Artificial Sequence
  Non-cyclic GFR-binding peptide
  MOD_RES (14), (15): Xaa is C or S
FYLMNIPSTKVPAXXTSPVR

SEQ ID NO: 3036 - protein, 16 aa, Artificial Sequence
  Non-cyclic GFR-binding peptide
  MOD_RES (2), (3): Xaa is C or S
AXXVPTELSPINMLYF

SEQ ID NO: 3037 - protein, 13 aa, Artificial Sequence
  Non-cyclic GFR-binding peptide
APTKLSPINVLYF

SEQ ID NO: 3038 - protein, 14 aa, Artificial Sequence
  Non-cyclic GFR-binding peptide
  MOD_RES (1), (1): Xaa is C or S
XVPTKLSPINILYF

SEQ ID NO: 3039 - protein, 16 aa, Artificial Sequence
  Non-cyclic GFR-binding peptide
  MOD_RES (2), (3): Xaa is C or S
SXXVPARLSPINILYF

SEQ ID NO: 3040 - protein, 15 aa, Artificial Sequence
  Non-cyclic GFR-binding peptide
  MOD_RES (1), (2): Xaa is C or S
XXAPVKTSPINMLYF

SEQ ID NO: 3041 - protein, 14 aa, Artificial Sequence
  Non-cyclic GFR-binding peptide
  MOD_RES (1), (1): Xaa is C or S
XAPTQLSPINVLYF

SEQ ID NO: 3042 - protein, 19 aa, Artificial Sequence
  Non-cyclic GFR-binding peptide
  MOD_RES (5), (6): Xaa is C or S
IPKAXXVPTELSPINMLYF

SEQ ID NO: 3043 - protein, 13 aa, Artificial Sequence
  Non-cyclic GFR-binding peptide
VPTRLSPINILYF

SEQ ID NO: 3044 - protein, 20 aa, Artificial Sequence
  Non-cyclic GFR-binding peptide
  MOD_RES (6), (7): Xaa is C or S
AAPASXXVPARLSPINILYF

SEQ ID NO: 3045 - protein, 13 aa, Artificial Sequence
  Non-cyclic GFR-binding peptide
VPTKLSPINVLYF

SEQ ID NO: 3046 - protein, 17 aa, Artificial Sequence
  Non-cyclic GFR-binding peptide
  MOD_RES (3), (4): Xaa is C or S
KAXXAPTKLSPINVLYF

SEQ ID NO: 3047 - protein, 10 aa, Artificial Sequence
  Non-cyclic GFR-binding peptide
QLSPINVLYF

SEQ ID NO: 3048 - protein, 10 aa, Artificial Sequence
  Non-cyclic GFR-binding peptide
RLSPINILYF

SEQ ID NO: 3049 - protein, 10 aa, Artificial Sequence
  Non-cyclic GFR-binding peptide
KLSPINVLYF

SEQ ID NO: 3050 - protein, 15 aa, Artificial Sequence
  Non-cyclic GFR-binding peptide
  MOD_RES (1), (2): Xaa is C or S
XXVPTELSPINMLYF

SEQ ID NO: 3051 - protein, 16 aa, Artificial Sequence
  Non-cyclic GFR-binding peptide
  MOD_RES (2), (3): Xaa is C or S
TXXVPTRLSPINILYF

SEQ ID NO: 3052 - protein, 14 aa, Artificial Sequence
  Non-cyclic GFR-binding peptide
  MOD_RES (1), (1): Xaa is C or S
XVPTRLSPINILYF

SEQ ID NO: 3053 - protein, 17 aa, Artificial Sequence
  Non-cyclic GFR-binding peptide
  MOD_RES (4), (4): Xaa is C or S
KPTXAPTKLSPINVLYF

SEQ ID NO: 3054 - protein, 20 aa, Artificial Sequence
  Non-cyclic GFR-binding peptide
  MOD_RES (6), (7): Xaa is C or S
KASKAXXVPTKLSPINILYF

SEQ ID NO: 3055 - protein, 11 aa, Artificial Sequence
  Non-cyclic GFR-binding peptide
TELSPINMLYF

SEQ ID NO: 3056 - protein, 11 aa, Artificial Sequence
  Non-cyclic GFR-binding peptide
ARLSPINILYF

SEQ ID NO: 3057 - protein, 19 aa, Artificial Sequence
  Non-cyclic GFR-binding peptide
  MOD_RES (6), (6): Xaa is C or S
VTKPTXAPTKLSPINVLYF

SEQ ID NO: 3058 - protein, 13 aa, Artificial Sequence
  Non-cyclic GFR-binding peptide
VPTKLSPINILYF

SEQ ID NO: 3059 - protein, 20 aa, Artificial Sequence
  Non-cyclic GFR-binding peptide
  MOD_RES (6), (7): Xaa is C or S
SIPKAXXVPTELSPINMLYF

SEQ ID NO: 3060 - protein, 17 aa, Artificial Sequence
  Non-cyclic GFR-binding peptide
  MOD_RES (3), (4): Xaa is C or S
PTXXVPTRLSPINILYF

SEQ ID NO: 3061 - protein, 13 aa, Artificial Sequence
  Non-cyclic GFR-binding peptide
APTQLSPINVLYF

SEQ ID NO: 3062 - protein, 9 aa, Artificial Sequence
  Non-cyclic GFR-binding peptide
LSPINMLYF

SEQ ID NO: 3063 - protein, 16 aa, Artificial Sequence
  Non-cyclic GFR-binding peptide
  MOD_RES (2), (3): Xaa is C or S
TXXAPVKTSPINMLYF

SEQ ID NO: 3064 - protein, 12 aa, Artificial Sequence
  Non-cyclic GFR-binding peptide
PTKLSPINILYF

SEQ ID NO: 3065 - protein, 20 aa, Artificial Sequence
  Non-cyclic GFR-binding peptide
  MOD_RES (6), (7): Xaa is C or S
TVPKPXXAPTQLSPINVLYF

SEQ ID NO: 3066 - protein, 20 aa, Artificial Sequence
  Non-cyclic GFR-binding peptide
  MOD_RES (6), (7): Xaa is C or S
KVGKAXXVPTKLSPINVLYF

SEQ ID NO: 3067 - protein, 12 aa, Artificial Sequence
  Non-cyclic GFR-binding peptide
PTELSPINMLYF

SEQ ID NO: 3068 - protein, 14 aa, Artificial Sequence
  Non-cyclic GFR-binding peptide
  MOD_RES (1), (1): Xaa is C or S
XVPTKLSPINVLYF

SEQ ID NO: 3069 - protein, 18 aa, Artificial Sequence
  Non-cyclic GFR-binding peptide
  MOD_RES (4), (5): Xaa is C or S
PKAXXVPTELSPINMLYF

SEQ ID NO: 3070 - protein, 16 aa, Artificial Sequence
  Non-cyclic GFR-binding peptide
  MOD_RES (2), (3): Xaa is C or S
PXXAPTKLSPINVLYF

SEQ ID NO: 3071 - protein, 18 aa, Artificial Sequence
  Non-cyclic GFR-binding peptide
  MOD_RES (5), (5): Xaa is C or S
TKPTXAPTKLSPINVLYF

SEQ ID NO: 3072 - protein, 15 aa, Artificial Sequence
  Non-cyclic GFR-binding peptide
  MOD_RES (1), (2): Xaa is C or S
XXVPARLSPINILYF

SEQ ID NO: 3073 - protein, 19 aa, Artificial Sequence
  Non-cyclic GFR-binding peptide
  MOD_RES (5), (6): Xaa is C or S
VPKAXXAPTKLSPINVLYF

SEQ ID NO: 3074 - protein, 20 aa, Artificial Sequence
  Non-cyclic GFR-binding peptide
  MOD_RES (6), (7): Xaa is C or S
KIPKAXXVPTELSPINMLYF

SEQ ID NO: 3075 - protein, 13 aa, Artificial Sequence
  Non-cyclic GFR-binding peptide
APVKTSPINMLYF

SEQ ID NO: 3076 - protein, 12 aa, Artificial Sequence
  Non-cyclic GFR-binding peptide
PVKTSPINMLYF

SEQ ID NO: 3077 - protein, 17 aa, Artificial Sequence
  Non-cyclic GFR-binding peptide
  MOD_RES (3), (4): Xaa is C or S
KPXXAPTQLSPINVLYF

SEQ ID NO: 3078 - protein, 11 aa, Artificial Sequence
  Non-cyclic GFR-binding peptide
TQLSPINVLYF

SEQ ID NO: 3079 - protein, 14 aa, Artificial Sequence
  Non-cyclic GFR-binding peptide
  MOD_RES (1), (1): Xaa is C or S
XVPTELSPINMLYF

SEQ ID NO: 3080 - protein, 18 aa, Artificial Sequence
  Non-cyclic GFR-binding peptide
  MOD_RES (4), (5): Xaa is C or S
PSTXXAPVKTSPINMLYF

SEQ ID NO: 3081 - protein, 19 aa, Artificial Sequence
  Non-cyclic GFR-binding peptide
  MOD_RES (5), (6): Xaa is C or S
VPKPXXAPTQLSPINVLYF

SEQ ID NO: 3082 - protein, 16 aa, Artificial Sequence
  Non-cyclic GFR-binding peptide
  MOD_RES (2), (3): Xaa is C or S
AXXVPTKLSPINVLYF

SEQ ID NO: 3083 - protein, 10 aa, Artificial Sequence
  Non-cyclic GFR-binding peptide
KTSPINMLYF

SEQ ID NO: 3084 - protein, 18 aa, Artificial Sequence
  Non-cyclic GFR-binding peptide
  MOD_RES (4), (5): Xaa is C or S
PPTXXVPTRLSPINILYF

SEQ ID NO: 3085 - protein, 18 aa, Artificial Sequence
  Non-cyclic GFR-binding peptide
  MOD_RES (4), (5): Xaa is C or S
PKPXXAPTQLSPINVLYF

SEQ ID NO: 3086 - protein, 18 aa, Artificial Sequence
  Non-cyclic GFR-binding peptide
  MOD_RES (4), (5): Xaa is C or S
PKPXXAPTKLSPINVLYF

SEQ ID NO: 3087 - protein, 16 aa, Artificial Sequence
  Non-cyclic GFR-binding peptide
  MOD_RES (2), (3): Xaa is C or S
AXXAPTKLSPINVLYF

SEQ ID NO: 3088 - protein, 18 aa, Artificial Sequence
  Non-cyclic GFR-binding peptide
  MOD_RES (4), (5): Xaa is C or S
SKAXXVPTKLSPINILYF

SEQ ID NO: 3089 - protein, 13 aa, Artificial Sequence
  Non-cyclic GFR-binding peptide
VPTELSPINMLYF

SEQ ID NO: 3090 - protein, 16 aa, Artificial Sequence
  Non-cyclic GFR-binding peptide
  MOD_RES (2), (3): Xaa is C or S
AXXVPTKLSPINILYF

SEQ ID NO: 3091 - protein, 13 aa, Artificial Sequence
  Non-cyclic GFR-binding peptide
VPARLSPINILYF

SEQ ID NO: 3092 - protein, 11 aa, Artificial Sequence
  Non-cyclic GFR-binding peptide
TRLSPINILYF

SEQ ID NO: 3093 - protein, 20 aa, Artificial Sequence
  Non-cyclic GFR-binding peptide
  MOD_RES (6), (7): Xaa is C or S
HVPKPXXAPTKLSPINVLYF

SEQ ID NO: 3094 - protein, 15 aa, Artificial Sequence
  Non-cyclic GFR-binding peptide
  MOD_RES (1), (2): Xaa is C or S
XXVPTRLSPINILYF

SEQ ID NO: 3095 - protein, 9 aa, Artificial Sequence
  Non-cyclic GFR-binding peptide
LSPINVLYF

SEQ ID NO: 3096 - protein, 16 aa, Artificial Sequence
  Non-cyclic GFR-binding peptide
  MOD_RES (3), (3): Xaa is C or S
PTXAPTKLSPINVLYF

SEQ ID NO: 3097 - protein, 15 aa, Artificial Sequence
  Non-cyclic GFR-binding peptide
  MOD_RES (1), (2): Xaa is C or S
XXVPTKLSPINVLYF

SEQ ID NO: 3098 - protein, 12 aa, Artificial Sequence
  Non-cyclic GFR-binding peptide
PTRLSPINILYF

SEQ ID NO: 3099 - protein, 15 aa, Artificial Sequence
  Non-cyclic GFR-binding peptide
  MOD_RES (1), (2): Xaa is C or S
XXAPTKLSPINVLYF

SEQ ID NO: 3100 - protein, 11 aa, Artificial Sequence
  Non-cyclic GFR-binding peptide
VKTSPINMLYF

SEQ ID NO: 3101 - protein, 17 aa, Artificial Sequence
  Non-cyclic GFR-binding peptide
  MOD_RES (3), (4): Xaa is C or S
KAXXVPTELSPINMLYF

SEQ ID NO: 3102 - protein, 12 aa, Artificial Sequence
  Non-cyclic GFR-binding peptide
PTQLSPINVLYF

SEQ ID NO: 3103 - protein, 15 aa, Artificial Sequence
  Non-cyclic GFR-binding peptide
  MOD_RES (1), (2): Xaa is C or S
XXVPTKLSPINILYF

SEQ ID NO: 3104 - protein, 11 aa, Artificial Sequence
  Non-cyclic GFR-binding peptide
TKLSPINILYF

SEQ ID NO: 3105 - protein, 12 aa, Artificial Sequence
  Non-cyclic GFR-binding peptide
PTKLSPINVLYF

SEQ ID NO: 3106 - protein, 18 aa, Artificial Sequence
  Non-cyclic GFR-binding peptide
  MOD_RES (4), (5): Xaa is C or S
GKAXXVPTKLSPINVLYF

SEQ ID NO: 3107 - protein, 15 aa, Artificial Sequence
  Non-cyclic GFR-binding peptide
  MOD_RES (1), (2): Xaa is C or S
XXAPTQLSPINVLYF

SEQ ID NO: 3108 - protein, 19 aa, Artificial Sequence
  Non-cyclic GFR-binding peptide
  MOD_RES (5), (6): Xaa is C or S
VPSTXXAPVKTSPINMLYF

SEQ ID NO: 3109 - protein, 9 aa, Artificial Sequence
  Non-cyclic GFR-binding peptide
LSPINILYF

SEQ ID NO: 3110 - protein, 17 aa, Artificial Sequence
  Non-cyclic GFR-binding peptide
  MOD_RES (3), (4): Xaa is C or S
STXXAPVKTSPINMLYF

SEQ ID NO: 3111 - protein, 15 aa, Artificial Sequence
  Non-cyclic GFR-binding peptide
  MOD_RES (2), (2): Xaa is C or S
TXAPTKLSPINVLYF

SEQ ID NO: 3112 - protein, 12 aa, Artificial Sequence
  Non-cyclic GFR-binding peptide
PARLSPINILYF

SEQ ID NO: 3113 - protein, 16 aa, Artificial Sequence
  Non-cyclic GFR-binding peptide
  MOD_RES (2), (3): Xaa is C or S
PXXAPTQLSPINVLYF

SEQ ID NO: 3114 - protein, 20 aa, Artificial Sequence
  Non-cyclic GFR-binding peptide
  MOD_RES (6), (7): Xaa is C or S
YVPKPXXAPTKLSPINVLYF

SEQ ID NO: 3115 - protein, 10 aa, Artificial Sequence
  Non-cyclic GFR-binding peptide
ELSPINMLYF

SEQ ID NO: 3116 - protein, 18 aa, Artificial Sequence
  Non-cyclic GFR-binding peptide
  MOD_RES (4), (5): Xaa is C or S
PKAXXAPTKLSPINVLYF

SEQ ID NO: 3117 - protein, 18 aa, Artificial Sequence
  Non-cyclic GFR-binding peptide
  MOD_RES (4), (5): Xaa is C or S
PASXXVPARLSPINILYF

SEQ ID NO: 3118 - protein, 19 aa, Artificial Sequence
  Non-cyclic GFR-binding peptide
  MOD_RES (5), (6): Xaa is C or S
APASXXVPARLSPINILYF

SEQ ID NO: 3119 - protein, 14 aa, Artificial Sequence
  Non-cyclic GFR-binding peptide
  MOD_RES (1), (1): Xaa is C or S
XAPVKTSPINMLYF

SEQ ID NO: 3120 - protein, 17 aa, Artificial Sequence
  Non-cyclic GFR-binding peptide
  MOD_RES (3), (4): Xaa is C or S
KAXXVPTKLSPINILYF

SEQ ID NO: 3121 - protein, 10 aa, Artificial Sequence
  Non-cyclic GFR-binding peptide
KLSPINILYF

SEQ ID NO: 3122 - protein, 11 aa, Artificial Sequence
  Non-cyclic GFR-binding peptide
TKLSPINVLYF

SEQ ID NO: 3123 - protein, 17 aa, Artificial Sequence
  Non-cyclic GFR-binding peptide
  MOD_RES (3), (4): Xaa is C or S
KPXXAPTKLSPINVLYF

SEQ ID NO: 3124 - protein, 20 aa, Artificial Sequence
  Non-cyclic GFR-binding peptide
  MOD_RES (6), (7): Xaa is C or S
STPPTXXVPTRLSPINILYF

SEQ ID NO: 3125 - protein, 9 aa, Artificial Sequence
  Non-cyclic GFR-binding peptide
TSPINMLYF

SEQ ID NO: 3126 - protein, 17 aa, Artificial Sequence
  Non-cyclic GFR-binding peptide
  MOD_RES (3), (4): Xaa is C or S
ASXXVPARLSPINILYF

SEQ ID NO: 3127 - protein, 19 aa, Artificial Sequence
  Non-cyclic GFR-binding peptide
  MOD_RES (5), (6): Xaa is C or S
VGKAXXVPTKLSPINVLYF

SEQ ID NO: 3128 - protein, 14 aa, Artificial Sequence
  Non-cyclic GFR-binding peptide
  MOD_RES (1), (1): Xaa is C or S
XAPTKLSPINVLYF

SEQ ID NO: 3129 - protein, 20 aa, Artificial Sequence
  Non-cyclic GFR-binding peptide
  MOD_RES (7), (7): Xaa is C or S
HVTKPTXAPTKLSPINVLYF

SEQ ID NO: 3130 - protein, 20 aa, Artificial Sequence
  Non-cyclic GFR-binding peptide
  MOD_RES (6), (7): Xaa is C or S
AVPKAXXAPTKLSPINVLYF

SEQ ID NO: 3131 - protein, 19 aa, Artificial Sequence
  Non-cyclic GFR-binding peptide
  MOD_RES (5), (6): Xaa is C or S
TPPTXXVPTRLSPINILYF

SEQ ID NO: 3132 - protein, 14 aa, Artificial Sequence
  Non-cyclic GFR-binding peptide
  MOD_RES (1), (1): Xaa is C or S
XVPARLSPINILYF

SEQ ID NO: 3133 - protein, 17 aa, Artificial Sequence
  Non-cyclic GFR-binding peptide
  MOD_RES (3), (4): Xaa is C or S
KAXXVPTKLSPINVLYF

SEQ ID NO: 3134 - protein, 19 aa, Artificial Sequence
  Non-cyclic GFR-binding peptide
  MOD_RES (5), (6): Xaa is C or S
VPKPXXAPTKLSPINVLYF

SEQ ID NO: 3135 - protein, 19 aa, Artificial Sequence
  Non-cyclic GFR-binding peptide
  MOD_RES (5), (6): Xaa is C or S
ASKAXXVPTKLSPINILYF

SEQ ID NO: 3136 - protein, 20 aa, Artificial Sequence
  Non-cyclic GFR-binding peptide
  MOD_RES (6), (7): Xaa is C or S
RVPSTXXAPVKTSPINMLYF

SEQ ID NO: 3137 - protein, 14 aa, Artificial Sequence
  Non-cyclic GFR-binding peptide
  MOD_RES (14), (14): Xaa is C or S
IYLISIPSLRTPVX

SEQ ID NO: 3138 - protein, 20 aa, Artificial Sequence
  Non-cyclic GFR-binding peptide
  MOD_RES (14), (15): Xaa is C or S
IYLMSIPSMKTPTXXPGASG

SEQ ID NO: 3139 - protein, 11 aa, Artificial Sequence
  Non-cyclic GFR-binding peptide
IYLMSIPSMKT

SEQ ID NO: 3140 - protein, 15 aa, Artificial Sequence
  Non-cyclic GFR-binding peptide
  MOD_RES (14), (15): Xaa is C or S
IYLMSIPSTKVPAXX

SEQ ID NO: 3141 - protein, 10 aa, Artificial Sequence
  Non-cyclic GFR-binding peptide
IYLMSIPSMK

SEQ ID NO: 3142 - protein, 13 aa, Artificial Sequence
  Non-cyclic GFR-binding peptide
IYLMSIPSMKTPT

SEQ ID NO: 3143 - protein, 17 aa, Artificial Sequence
  Non-cyclic GFR-binding peptide
  MOD_RES (14), (15): Xaa is C or S
IYLMSIPSMKTPTXXPG

SEQ ID NO: 3144 - protein, 14 aa, Artificial Sequence
  Non-cyclic GFR-binding peptide
  MOD_RES (14), (14): Xaa is C or S
IYLMSIPSTKVPAX

SEQ ID NO: 3145 - protein, 19 aa, Artificial Sequence
  Non-cyclic GFR-binding peptide
  MOD_RES (14), (15): Xaa is C or S
IYLISIPSLRTPVXXTPPT

SEQ ID NO: 3146 - protein, 20 aa, Artificial Sequence
  Non-cyclic GFR-binding peptide
  MOD_RES (14), (15): Xaa is C or S
IYLVSIPSLKTPAXXPKPVH

SEQ ID NO: 3147 - protein, 9 aa, Artificial Sequence
  Non-cyclic GFR-binding peptide
IYLMSIPSM

SEQ ID NO: 3148 - protein, 12 aa, Artificial Sequence
  Non-cyclic GFR-binding peptide
IYLISIPSLRTP

SEQ ID NO: 3149 - protein, 19 aa, Artificial Sequence
  Non-cyclic GFR-binding peptide
  MOD_RES (14), (15): Xaa is C or S
IYLMSIPSTKVPAXXTSPV

SEQ ID NO: 3150 - protein, 11 aa, Artificial Sequence
  Non-cyclic GFR-binding peptide
IYLMSIPSTKV

SEQ ID NO: 3151 - protein, 20 aa, Artificial Sequence
  Non-cyclic GFR-binding peptide
  MOD_RES (14), (15): Xaa is C or S
IYLMSIPSTKVPAXXTSPVR

SEQ ID NO: 3152 - protein, 18 aa, Artificial Sequence
  Non-cyclic GFR-binding peptide
  MOD_RES (14), (15): Xaa is C or S
IYLMSIPSTKVPAXXTSP

SEQ ID NO: 3153 - protein, 10 aa, Artificial Sequence
  Non-cyclic GFR-binding peptide
IYLMSIPSTK

SEQ ID NO: 3154 - protein, 12 aa, Artificial Sequence
  Non-cyclic GFR-binding peptide
IYLMSIPSTKVP

SEQ ID NO: 3155 - protein, 15 aa, Artificial Sequence
  Non-cyclic GFR-binding peptide
  MOD_RES (14), (15): Xaa is C or S
IYLMSIPSMKTPTXX

SEQ ID NO: 3156 - protein, 16 aa, Artificial Sequence
  Non-cyclic GFR-binding peptide
  MOD_RES (14), (15): Xaa is C or S
IYLMSIPSMKTPTXXP

SEQ ID NO: 3157 - protein, 18 aa, Artificial Sequence
  Non-cyclic GFR-binding peptide
  MOD_RES (14), (15): Xaa is C or S
IYLISIPSLRTPVXXTPP

SEQ ID NO: 3158 - protein, 15 aa, Artificial Sequence
  Non-cyclic GFR-binding peptide
  MOD_RES (14), (15): Xaa is C or S
IYLISIPSLRTPVXX

SEQ ID NO: 3159 - protein, 13 aa, Artificial Sequence
  Non-cyclic GFR-binding peptide
IYLISIPSLRTPV

SEQ ID NO: 3160 - protein, 16 aa, Artificial Sequence
  Non-cyclic GFR-binding peptide
  MOD_RES (14), (15): Xaa is C or S
IYLISIPSLRTPVXXT

SEQ ID NO: 3161 - protein, 18 aa, Artificial Sequence
  Non-cyclic GFR-binding peptide
  MOD_RES (14), (15): Xaa is C or S
IYLMSIPSMKTPTXXPGA

SEQ ID NO: 3162 - protein, 20 aa, Artificial Sequence
  Non-cyclic GFR-binding peptide
  MOD_RES (14), (15): Xaa is C or S
IYLISIPSLRTPVXXTPPTS

SEQ ID NO: 3163 - protein, 13 aa, Artificial Sequence
  Non-cyclic GFR-binding peptide
IYLMSIPSTKVPA

SEQ ID NO: 3164 - protein, 9 aa, Artificial Sequence
  Non-cyclic GFR-binding peptide
IYLMSIPST

SEQ ID NO: 3165 - protein, 16 aa, Artificial Sequence
  Non-cyclic GFR-binding peptide
  MOD_RES (14), (15): Xaa is C or S
IYLMSIPSTKVPAXXT

SEQ ID NO: 3166 - protein, 11 aa, Artificial Sequence
  Non-cyclic GFR-binding peptide
IYLISIPSLRT

SEQ ID NO: 3167 - protein, 17 aa, Artificial Sequence
  Non-cyclic GFR-binding peptide
  MOD_RES (14), (15): Xaa is C or S
IYLISIPSLRTPVXXTP

SEQ ID NO: 3168 - protein, 17 aa, Artificial Sequence
  Non-cyclic GFR-binding peptide
  MOD_RES (14), (15): Xaa is C or S
IYLMSIPSTKVPAXXTS

SEQ ID NO: 3169 - protein, 14 aa, Artificial Sequence
  Non-cyclic GFR-binding peptide
  MOD_RES (14), (14): Xaa is C or S
IYLMSIPSMKTPTX

SEQ ID NO: 3170 - protein, 12 aa, Artificial Sequence
  Non-cyclic GFR-binding peptide
IYLMSIPSMKTP

SEQ ID NO: 3171 - protein, 19 aa, Artificial Sequence
  Non-cyclic GFR-binding peptide
  MOD_RES (14), (15): Xaa is C or S
IYLMSIPSMKTPTXXPGAS

SEQ ID NO: 3172 - protein, 14 aa, Artificial Sequence
  Non-cyclic GFR-binding peptide
  MOD_RES (1), (1): Xaa is C or S
XVPTRLSPISILYI

SEQ ID NO: 3173 - protein, 20 aa, Artificial Sequence
  Non-cyclic GFR-binding peptide
  MOD_RES (6), (7): Xaa is C or S
GSAGPXXTPTKMSPISMLYI

SEQ ID NO: 3174 - protein, 11 aa, Artificial Sequence
  Non-cyclic GFR-binding peptide
TKMSPISMLYI

SEQ ID NO: 3175 - protein, 15 aa, Artificial Sequence
  Non-cyclic GFR-binding peptide
  MOD_RES (1), (2): Xaa is C or S
XXAPVKTSPISMLYI

SEQ ID NO: 3176 - protein, 10 aa, Artificial Sequence
  Non-cyclic GFR-binding peptide
KMSPISMLYI

SEQ ID NO: 3177 - protein, 13 aa, Artificial Sequence
  Non-cyclic GFR-binding peptide
TPTKMSPISMLYI

SEQ ID NO: 3178 - protein, 17 aa, Artificial Sequence
  Non-cyclic GFR-binding peptide
  MOD_RES (3), (4): Xaa is C or S
GPXXTPTKMSPISMLYI

SEQ ID NO: 3179 - protein, 14 aa, Artificial Sequence
  Non-cyclic GFR-binding peptide
  MOD_RES (1), (1): Xaa is C or S
XAPVKTSPISMLYI

SEQ ID NO: 3180 - protein, 19 aa, Artificial Sequence
  Non-cyclic GFR-binding peptide
  MOD_RES (5), (6): Xaa is C or S
TPPTXXVPTRLSPISILYI

SEQ ID NO: 3181 - protein, 20 aa, Artificial Sequence
  Non-cyclic GFR-binding peptide
  MOD_RES (6), (7): Xaa is C or S
HVPKPXXAPTKLSPISVLYI

SEQ ID NO: 3182 - protein, 9 aa, Artificial Sequence
  Non-cyclic GFR-binding peptide
MSPISMLYI

SEQ ID NO: 3183 - protein, 12 aa, Artificial Sequence
  Non-cyclic GFR-binding peptide
PTRLSPISILYI

SEQ ID NO: 3184 - protein, 19 aa, Artificial Sequence
  Non-cyclic GFR-binding peptide
  MOD_RES (5), (6): Xaa is C or S
VPSTXXAPVKTSPISMLYI

SEQ ID NO: 3185 - protein, 11 aa, Artificial Sequence
  Non-cyclic GFR-binding peptide
VKTSPISMLYI

SEQ ID NO: 3186 - protein, 20 aa, Artificial Sequence
  Non-cyclic GFR-binding peptide
  MOD_RES (6), (7): Xaa is C or S
RVPSTXXAPVKTSPISMLYI

SEQ ID NO: 3187 - protein, 18 aa, Artificial Sequence
  Non-cyclic GFR-binding peptide
  MOD_RES (4), (5): Xaa is C or S
PSTXXAPVKTSPISMLYI

SEQ ID NO: 3188 - protein, 10 aa, Artificial Sequence
  Non-cyclic GFR-binding peptide
KTSPISMLYI

SEQ ID NO: 3189 - protein, 12 aa, Artificial Sequence
  Non-cyclic GFR-binding peptide
PVKTSPISMLYI

SEQ ID NO: 3190 - protein, 15 aa, Artificial Sequence
  Non-cyclic GFR-binding peptide
  MOD_RES (1), (2): Xaa is C or S
XXTPTKMSPISMLYI

SEQ ID NO: 3191 - protein, 16 aa, Artificial Sequence
  Non-cyclic GFR-binding peptide
  MOD_RES (2), (3): Xaa is C or S
PXXTPTKMSPISMLYI

SEQ ID NO: 3192 - protein, 18 aa, Artificial Sequence
  Non-cyclic GFR-binding peptide
  MOD_RES (4), (5): Xaa is C or S
PPTXXVPTRLSPISILYI

SEQ ID NO: 3193 - protein, 15 aa, Artificial Sequence
  Non-cyclic GFR-binding peptide
  MOD_RES (1), (2): Xaa is C or S
XXVPTRLSPISILYI

SEQ ID NO: 3194 - protein, 13 aa, Artificial Sequence
  Non-cyclic GFR-binding peptide
VPTRLSPISILYI

SEQ ID NO: 3195 - protein, 16 aa, Artificial Sequence
  Non-cyclic GFR-binding peptide
  MOD_RES (2), (3): Xaa is C or S
TXXVPTRLSPISILYI

SEQ ID NO: 3196 - protein, 18 aa, Artificial Sequence
  Non-cyclic GFR-binding peptide
  MOD_RES (4), (5): Xaa is C or S
AGPXXTPTKMSPISMLYI

SEQ ID NO: 3197 - protein, 20 aa, Artificial Sequence
  Non-cyclic GFR-binding peptide
  MOD_RES (6), (7): Xaa is C or S
STPPTXXVPTRLSPISILYI

SEQ ID NO: 3198 - protein, 13 aa, Artificial Sequence
  Non-cyclic GFR-binding peptide
APVKTSPISMLYI

SEQ ID NO: 3199 - protein, 9 aa, Artificial Sequence
  Non-cyclic GFR-binding peptide
TSPISMLYI

SEQ ID NO: 3200 - protein, 16 aa, Artificial Sequence
  Non-cyclic GFR-binding peptide
  MOD_RES (2), (3): Xaa is C or S
TXXAPVKTSPISMLYI

SEQ ID NO: 3201 - protein, 11 aa, Artificial Sequence
  Non-cyclic GFR-binding peptide
TRLSPISILYI

SEQ ID NO: 3202 - protein, 17 aa, Artificial Sequence
  Non-cyclic GFR-binding peptide
  MOD_RES (3), (4): Xaa is C or S
PTXXVPTRLSPISILYI

SEQ ID NO: 3203 - protein, 17 aa, Artificial Sequence
  Non-cyclic GFR-binding peptide
  MOD_RES (3), (4): Xaa is C or S
STXXAPVKTSPISMLYI

SEQ ID NO: 3204 - protein, 14 aa, Artificial Sequence
  Non-cyclic GFR-binding peptide
  MOD_RES (1), (1): Xaa is C or S
XTPTKMSPISMLYI

SEQ ID NO: 3205 - protein, 12 aa, Artificial Sequence
  Non-cyclic GFR-binding peptide
PTKMSPISMLYI

SEQ ID NO: 3206 - protein, 19 aa, Artificial Sequence
  Non-cyclic GFR-binding peptide
  MOD_RES (5), (6): Xaa is C or S
SAGPXXTPTKMSPISMLYI

SEQ ID NO: 3207 - protein, 12 aa, Artificial Sequence
  Non-cyclic GFR-binding peptide
FFLISLSSLRAP

SEQ ID NO: 3208 - protein, 15 aa, Artificial Sequence
  Non-cyclic GFR-binding peptide
  MOD_RES (14), (14): Xaa is C or S
FFLVSLSSLKTPAXT

SEQ ID NO: 3209 - protein, 20 aa, Artificial Sequence
  Non-cyclic GFR-binding peptide
  MOD_RES (14), (15): Xaa is C or S
FFLVSLSSLKTPAXXPKPVY

SEQ ID NO: 3210 - protein, 20 aa, Artificial Sequence
  Non-cyclic GFR-binding peptide
  MOD_RES (16), (16): Xaa is C or S
FFLVSLSSHHVRSPQXKVSS

SEQ ID NO: 3211 - protein, 15 aa, Artificial Sequence
  Non-cyclic GFR-binding peptide
  MOD_RES (14), (15): Xaa is C or S
FFLISLSSLDQPVXX

SEQ ID NO: 3212 - protein, 12 aa, Artificial Sequence
  Non-cyclic GFR-binding peptide
FFLMSLSSLETP

SEQ ID NO: 3213 - protein, 10 aa, Artificial Sequence
  Non-cyclic GFR-binding peptide
FFLISLSSLK

SEQ ID NO: 3214 - protein, 20 aa, Artificial Sequence
  Non-cyclic GFR-binding peptide
  MOD_RES (14), (15): Xaa is C or S
FFLISLSSLAQPVXXPAASA

SEQ ID NO: 3215 - protein, 9 aa, Artificial Sequence
  Non-cyclic GFR-binding peptide
FFLMSLSSL

SEQ ID NO: 3216 - protein, 18 aa, Artificial Sequence
  Non-cyclic GFR-binding peptide
  MOD_RES (14), (14): Xaa is C or S
FFLMSLSSEETPVXELGE

SEQ ID NO: 3217 - protein, 19 aa, Artificial Sequence
  Non-cyclic GFR-binding peptide
  MOD_RES (14), (15): Xaa is C or S
FFLVSLSSLKTPAXXAKPV

SEQ ID NO: 3218 - protein, 12 aa, Artificial Sequence
  Non-cyclic GFR-binding peptide
FFLVSLSSHHVR

SEQ ID NO: 3219 - protein, 15 aa, Artificial Sequence
  Non-cyclic GFR-binding peptide
  MOD_RES (14), (15): Xaa is C or S
FFLISLSSLDQSVXX

SEQ ID NO: 3220 - protein, 14 aa, Artificial Sequence
  Non-cyclic GFR-binding peptide
  MOD_RES (14), (14): Xaa is C or S
FFLMSLSSMKTPTX

SEQ ID NO: 3221 - protein, 13 aa, Artificial Sequence
  Non-cyclic GFR-binding peptide
FFLMSLSSTKVPA

SEQ ID NO: 3222 - protein, 20 aa, Artificial Sequence
  Non-cyclic GFR-binding peptide
  MOD_RES (14), (15): Xaa is C or S
FFLISLSSLRTPVXXTPPTS

SEQ ID NO: 3223 - protein, 11 aa, Artificial Sequence
  Non-cyclic GFR-binding peptide
FFLISLSSLDQ

SEQ ID NO: 3224 - protein, 18 aa, Artificial Sequence
  Non-cyclic GFR-binding peptide
  MOD_RES (14), (15): Xaa is C or S
FFLVSLSSLKTPAXXAKP

SEQ ID NO: 3225 - protein, 19 aa, Artificial Sequence
  Non-cyclic GFR-binding peptide
  MOD_RES (14), (15): Xaa is C or S
FFLVSLSSLKTPVXXAKGV

SEQ ID NO: 3226 - protein, 16 aa, Artificial Sequence
  Non-cyclic GFR-binding peptide
  MOD_RES (14), (15): Xaa is C or S
FFLMSLSSTKVPAXXT

SEQ ID NO: 3227 - protein, 18 aa, Artificial Sequence
  Non-cyclic GFR-binding peptide
  MOD_RES (14), (14): Xaa is C or S
FFLVSLSSLKTPAXTPKT

SEQ ID NO: 3228 - protein, 12 aa, Artificial Sequence
  Non-cyclic GFR-binding peptide
FFLISLSSLDQS

SEQ ID NO: 3229 - protein, 20 aa, Artificial Sequence
  Non-cyclic GFR-binding peptide
  MOD_RES (14), (14): Xaa is C or S
FFLMSLSSEETPVXELGEDN

SEQ ID NO: 3230 - protein, 10 aa, Artificial Sequence
  Non-cyclic GFR-binding peptide
FFLISLSSLR

SEQ ID NO: 3231 - protein, 17 aa, Artificial Sequence
  Non-cyclic GFR-binding peptide
  MOD_RES (16), (16): Xaa is C or S
FFLVSLSSHHVRSPQXK

SEQ ID NO: 3232 - protein, 20 aa, Artificial Sequence
  Non-cyclic GFR-binding peptide
  MOD_RES (14), (15): Xaa is C or S
FFLMSLSSLETPVXXAKPIS

SEQ ID NO: 3233 - protein, 13 aa, Artificial Sequence
  Non-cyclic GFR-binding peptide
FFLISLSSLAQPV

SEQ ID NO: 3234 - protein, 16 aa, Artificial Sequence
  Non-cyclic GFR-binding peptide
  MOD_RES (14), (15): Xaa is C or S
FFLISLSSLDQPVXXP

SEQ ID NO: 3235 - protein, 15 aa, Artificial Sequence
  Non-cyclic GFR-binding peptide
  MOD_RES (14), (15): Xaa is C or S
FFLISLSSLRAPVXX

SEQ ID NO: 3236 - protein, 11 aa, Artificial Sequence
  Non-cyclic GFR-binding peptide
FFLMSLSSLET

SEQ ID NO: 3237 - protein, 18 aa, Artificial Sequence
  Non-cyclic GFR-binding peptide
  MOD_RES (14), (15): Xaa is C or S
FFLMSLSSMKTPTXXPGA

SEQ ID NO: 3238 - protein, 9 aa, Artificial Sequence
  Non-cyclic GFR-binding peptide
FFLMSLSSE

SEQ ID NO: 3239 - protein, 17 aa, Artificial Sequence
  Non-cyclic GFR-binding peptide
  MOD_RES (14), (14): Xaa is C or S
FFLMSLSSEETPVXELG

SEQ ID NO: 3240 - protein, 11 aa, Artificial Sequence
  Non-cyclic GFR-binding peptide
FFLISLSSLRA

SEQ ID NO: 3241 - protein, 13 aa, Artificial Sequence
  Non-cyclic GFR-binding peptide
FFLISLSSLKTPV

SEQ ID NO: 3242 - protein, 13 aa, Artificial Sequence
  Non-cyclic GFR-binding peptide
FFLVSLSSLKTPA

SEQ ID NO: 3243 - protein, 15 aa, Artificial Sequence
  Non-cyclic GFR-binding peptide
  MOD_RES (14), (15): Xaa is C or S
FFLMSLSSLETPVXX

SEQ ID NO: 3244 - protein, 16 aa, Artificial Sequence
  Non-cyclic GFR-binding peptide
  MOD_RES (14), (15): Xaa is C or S
FFLMSLSSLETPVXXA

SEQ ID NO: 3245 - protein, 18 aa, Artificial Sequence
  Non-cyclic GFR-binding peptide
  MOD_RES (14), (15): Xaa is C or S
FFLVSLSSLQTPAXXPKP

SEQ ID NO: 3246 - protein, 16 aa, Artificial Sequence
  Non-cyclic GFR-binding peptide
  MOD_RES (14), (15): Xaa is C or S
FFLMSLSSMKTPTXXP

SEQ ID NO: 3247 - protein, 15 aa, Artificial Sequence
  Non-cyclic GFR-binding peptide
  MOD_RES (14), (15): Xaa is C or S
FFLISLSSLRTPVXX

SEQ ID NO: 3248 - protein, 18 aa, Artificial Sequence
  Non-cyclic GFR-binding peptide
  MOD_RES (14), (15): Xaa is C or S
FFLISLSSLRTPVXXTPP

SEQ ID NO: 3249 - protein, 13 aa, Artificial Sequence
  Non-cyclic GFR-binding peptide
FFLVSLSSLQTPA

SEQ ID NO: 3250 - protein, 16 aa, Artificial Sequence
  Non-cyclic GFR-binding peptide
  MOD_RES (14), (14): Xaa is C or S
FFLVSLSSLKTPAXTP

SEQ ID NO: 3251 - protein, 15 aa, Artificial Sequence
  Non-cyclic GFR-binding peptide
  MOD_RES (14), (15): Xaa is C or S
FFLVSLSSLKTPVXX

SEQ ID NO: 3252 - protein, 10 aa, Artificial Sequence
  Non-cyclic GFR-binding peptide
FFLMSLSSMK

SEQ ID NO: 3253 - protein, 20 aa, Artificial Sequence
  Non-cyclic GFR-binding peptide
  MOD_RES (14), (15): Xaa is C or S
FFLMSLSSMKTPTXXPGASG

SEQ ID NO: 3254 - protein, 12 aa, Artificial Sequence
  Non-cyclic GFR-binding peptide
FFLVSLSSLQTP

SEQ ID NO: 3255 - protein, 16 aa, Artificial Sequence
  Non-cyclic GFR-binding peptide
  MOD_RES (14), (15): Xaa is C or S
FFLISLSSLRAPVXXS

SEQ ID NO: 3256 - protein, 14 aa, Artificial Sequence
  Non-cyclic GFR-binding peptide
  MOD_RES (14), (14): Xaa is C or S
FFLISLSSLDQPVX

SEQ ID NO: 3257 - protein, 19 aa, Artificial Sequence
  Non-cyclic GFR-binding peptide
  MOD_RES (14), (15): Xaa is C or S
FFLVSLSSLQTPAXXPKPV

SEQ ID NO: 3258 - protein, 15 aa, Artificial Sequence
  Non-cyclic GFR-binding peptide
  MOD_RES (14), (15): Xaa is C or S
FFLMSLSSTKVPAXX

SEQ ID NO: 3259 - protein, 16 aa, Artificial Sequence
  Non-cyclic GFR-binding peptide
  MOD_RES (14), (14): Xaa is C or S
FFLMSLSSEETPVXEL

SEQ ID NO: 3260 - protein, 14 aa, Artificial Sequence
  Non-cyclic GFR-binding peptide
  MOD_RES (14), (14): Xaa is C or S
FFLMSLSSLETPVX

SEQ ID NO: 3261 - protein, 14 aa, Artificial Sequence
  Non-cyclic GFR-binding peptide
  MOD_RES (14), (14): Xaa is C or S
FFLVSLSSLQTPAX

SEQ ID NO: 3262 - protein, 14 aa, Artificial Sequence
  Non-cyclic GFR-binding peptide
  MOD_RES (14), (14): Xaa is C or S
FFLISLSSLAQPVX

SEQ ID NO: 3263 - protein, 10 aa, Artificial Sequence
  Non-cyclic GFR-binding peptide
FFLVSLSSLK

SEQ ID NO: 3264 - protein, 16 aa, Artificial Sequence
  Non-cyclic GFR-binding peptide
  MOD_RES (14), (15): Xaa is C or S
FFLISLSSLDQSVXXP

SEQ ID NO: 3265 - protein, 19 aa, Artificial Sequence
  Non-cyclic GFR-binding peptide
  MOD_RES (14), (15): Xaa is C or S
FFLISLSSLDQPVXXPSAS

SEQ ID NO: 3266 - protein, 14 aa, Artificial Sequence
  Non-cyclic GFR-binding peptide
FFLVSLSSHHVRSP

SEQ ID NO: 3267 - protein, 18 aa, Artificial Sequence
  Non-cyclic GFR-binding peptide
  MOD_RES (14), (15): Xaa is C or S
FFLISLSSLKTPVXXAKS

SEQ ID NO: 3268 - protein, 13 aa, Artificial Sequence
  Non-cyclic GFR-binding peptide
FFLVSLSSHHVRS

SEQ ID NO: 3269 - protein, 15 aa, Artificial Sequence
  Non-cyclic GFR-binding peptide
FFLVSLSSHHVRSPQ

SEQ ID NO: 3270 - protein, 16 aa, Artificial Sequence
  Non-cyclic GFR-binding peptide
  MOD_RES (14), (15): Xaa is C or S
FFLISLSSLKTPVXXA

SEQ ID NO: 3271 - protein, 14 aa, Artificial Sequence
  Non-cyclic GFR-binding peptide
  MOD_RES (14), (14): Xaa is C or S
FFLISLSSLKTPVX

SEQ ID NO: 3272 - protein, 13 aa, Artificial Sequence
  Non-cyclic GFR-binding peptide
FFLVSLSSLKTPV

SEQ ID NO: 3273 - protein, 17 aa, Artificial Sequence
  Non-cyclic GFR-binding peptide
  MOD_RES (14), (15): Xaa is C or S
FFLVSLSSLQTPAXXPK

SEQ ID NO: 3274 - protein, 11 aa, Artificial Sequence
  Non-cyclic GFR-binding peptide
FFLVSLSSLQT

SEQ ID NO: 3275 - protein, 17 aa, Artificial Sequence
  Non-cyclic GFR-binding peptide
  MOD_RES (14), (15): Xaa is C or S
FFLVSLSSLKTPAXXAK

SEQ ID NO: 3276 - protein, 13 aa, Artificial Sequence
  Non-cyclic GFR-binding peptide
FFLISLSSLRTPV

SEQ ID NO: 3277 - protein, 10 aa, Artificial Sequence
  Non-cyclic GFR-binding peptide
FFLMSLSSTK

SEQ ID NO: 3278 - protein, 15 aa, Artificial Sequence
  Non-cyclic GFR-binding peptide
  MOD_RES (14), (15): Xaa is C or S
FFLMSLSSMKTPTXX

SEQ ID NO: 3279 - protein, 18 aa, Artificial Sequence
  Non-cyclic GFR-binding peptide
  MOD_RES (14), (15): Xaa is C or S
FFLISLSSLAQPVXXPAA

SEQ ID NO: 3280 - protein, 12 aa, Artificial Sequence
  Non-cyclic GFR-binding peptide
FFLISLSSLDQP

SEQ ID NO: 3281 - protein, 12 aa, Artificial Sequence
  Non-cyclic GFR-binding peptide
FFLMSLSSEETP

SEQ ID NO: 3282 - protein, 13 aa, Artificial Sequence
  Non-cyclic GFR-binding peptide
FFLMSLSSMKTPT

SEQ ID NO: 3283 - protein, 20 aa, Artificial Sequence
  Non-cyclic GFR-binding peptide
  MOD_RES (14), (15): Xaa is C or S
FFLMSLSSLETPVXXAKPIK

SEQ ID NO: 3284 - protein, 18 aa, Artificial Sequence
  Non-cyclic GFR-binding peptide
  MOD_RES (14), (15): Xaa is C or S
FFLMSLSSTKVPAXXTSP

SEQ ID NO: 3285 - protein, 16 aa, Artificial Sequence
  Non-cyclic GFR-binding peptide
  MOD_RES (14), (15): Xaa is C or S
FFLVSLSSLKTPVXXA

SEQ ID NO: 3286 - protein, 14 aa, Artificial Sequence
  Non-cyclic GFR-binding peptide
  MOD_RES (14), (14): Xaa is C or S
FFLMSLSSEETPVX

SEQ ID NO: 3287 - protein, 16 aa, Artificial Sequence
  Non-cyclic GFR-binding peptide
  MOD_RES (14), (15): Xaa is C or S
FFLVSLSSLKTPAXXP

SEQ ID NO: 3288 - protein, 17 aa, Artificial Sequence
  Non-cyclic GFR-binding peptide
  MOD_RES (14), (15): Xaa is C or S
FFLMSLSSMKTPTXXPG

SEQ ID NO: 3289 - protein, 12 aa, Artificial Sequence
  Non-cyclic GFR-binding peptide
FFLISLSSLKTP

SEQ ID NO: 3290 - protein, 20 aa, Artificial Sequence
  Non-cyclic GFR-binding peptide
  MOD_RES (14), (15): Xaa is C or S
FFLVSLSSLQTPAXXPKPVT

SEQ ID NO: 3291 - protein, 16 aa, Artificial Sequence
  Non-cyclic GFR-binding peptide
  MOD_RES (14), (15): Xaa is C or S
FFLVSLSSLQTPAXXP

SEQ ID NO: 3292 - protein, 20 aa, Artificial Sequence
  Non-cyclic GFR-binding peptide
  MOD_RES (14), (15): Xaa is C or S
FFLVSLSSLKTPVXXAKGVK

SEQ ID NO: 3293 - protein, 10 aa, Artificial Sequence
  Non-cyclic GFR-binding peptide
FFLMSLSSLE

SEQ ID NO: 3294 - protein, 16 aa, Artificial Sequence
  Non-cyclic GFR-binding peptide
  MOD_RES (16), (16): Xaa is C or S
FFLVSLSSHHVRSPQX

SEQ ID NO: 3295 - protein, 18 aa, Artificial Sequence
  Non-cyclic GFR-binding peptide
  MOD_RES (14), (15): Xaa is C or S
FFLISLSSLDQSVXXPSA

SEQ ID NO: 3296 - protein, 18 aa, Artificial Sequence
  Non-cyclic GFR-binding peptide
  MOD_RES (14), (15): Xaa is C or S
FFLISLSSLDQPVXXPSA

SEQ ID NO: 3297 - protein, 14 aa, Artificial Sequence
  Non-cyclic GFR-binding peptide
  MOD_RES (14), (14): Xaa is C or S
FFLVSLSSLKTPVX

SEQ ID NO: 3298 - protein, 15 aa, Artificial Sequence
  Non-cyclic GFR-binding peptide
  MOD_RES (14), (15): Xaa is C or S
FFLISLSSLAQPVXX

SEQ ID NO: 3299 - protein, 17 aa, Artificial Sequence
  Non-cyclic GFR-binding peptide
  MOD_RES (14), (15): Xaa is C or S
FFLISLSSLDQSVXXPS

SEQ ID NO: 3300 - protein, 11 aa, Artificial Sequence
  Non-cyclic GFR-binding peptide
FFLMSLSSMKT

SEQ ID NO: 3301 - protein, 9 aa, Artificial Sequence
  Non-cyclic GFR-binding peptide
FFLISLSSL

SEQ ID NO: 3302 - protein, 20 aa, Artificial Sequence
  Non-cyclic GFR-binding peptide
  MOD_RES (14), (15): Xaa is C or S
FFLMSLSSTKVPAXXTSPVR

SEQ ID NO: 3303 - protein, 13 aa, Artificial Sequence
  Non-cyclic GFR-binding peptide
FFLISLSSLDQSV

SEQ ID NO: 3304 - protein, 17 aa, Artificial Sequence
  Non-cyclic GFR-binding peptide
  MOD_RES (14), (14): Xaa is C or S
FFLVSLSSLKTPAXTPK

SEQ ID NO: 3305 - protein, 18 aa, Artificial Sequence
  Non-cyclic GFR-binding peptide
  MOD_RES (16), (16): Xaa is C or S
FFLVSLSSHHVRSPQXKV

SEQ ID NO: 3306 - protein, 12 aa, Artificial Sequence
  Non-cyclic GFR-binding peptide
FFLISLSSLAQP

SEQ ID NO: 3307 - protein, 19 aa, Artificial Sequence
  Non-cyclic GFR-binding peptide
  MOD_RES (14), (14): Xaa is C or S
FFLVSLSSLKTPAXTPKTV

SEQ ID NO: 3308 - protein, 11 aa, Artificial Sequence
  Non-cyclic GFR-binding peptide
FFLISLSSLAQ

SEQ ID NO: 3309 - protein, 16 aa, Artificial Sequence
  Non-cyclic GFR-binding peptide
  MOD_RES (14), (15): Xaa is C or S
FFLISLSSLRTPVXXT

SEQ ID NO: 3310 - protein, 18 aa, Artificial Sequence
  Non-cyclic GFR-binding peptide
  MOD_RES (14), (15): Xaa is C or S
FFLISLSSLRAPVXXSAP

SEQ ID NO: 3311 - protein, 18 aa, Artificial Sequence
  Non-cyclic GFR-binding peptide
  MOD_RES (14), (15): Xaa is C or S
FFLMSLSSLETPVXXAKP

SEQ ID NO: 3312 - protein, 11 aa, Artificial Sequence
  Non-cyclic GFR-binding peptide
FFLMSLSSTKV

SEQ ID NO: 3313 - protein, 17 aa, Artificial Sequence
  Non-cyclic GFR-binding peptide
  MOD_RES (14), (15): Xaa is C or S
FFLISLSSLRAPVXXSA

SEQ ID NO: 3314 - protein, 19 aa, Artificial Sequence
  Non-cyclic GFR-binding peptide
  MOD_RES (14), (15): Xaa is C or S
FFLISLSSLAQPVXXPAAS

SEQ ID NO: 3315 - protein, 17 aa, Artificial Sequence
  Non-cyclic GFR-binding peptide
  MOD_RES (14), (15): Xaa is C or S
FFLISLSSLAQPVXXPA

SEQ ID NO: 3316 - protein, 12 aa, Artificial Sequence
  Non-cyclic GFR-binding peptide
FFLMSLSSTKVP

SEQ ID NO: 3317 - protein, 17 aa, Artificial Sequence
  Non-cyclic GFR-binding peptide
  MOD_RES (14), (15): Xaa is C or S
FFLISLSSLRTPVXXTP

SEQ ID NO: 3318 - protein, 19 aa, Artificial Sequence
  Non-cyclic GFR-binding peptide
  MOD_RES (14), (15): Xaa is C or S
FFLMSLSSLETPVXXAKPI

SEQ ID NO: 3319 - protein, 15 aa, Artificial Sequence
  Non-cyclic GFR-binding peptide
  MOD_RES (14), (15): Xaa is C or S
FFLVSLSSLQTPAXX

SEQ ID NO: 3320 - protein, 19 aa, Artificial Sequence
  Non-cyclic GFR-binding peptide
  MOD_RES (14), (15): Xaa is C or S
FFLMSLSSTKVPAXXTSPV

SEQ ID NO: 3321 - protein, 10 aa, Artificial Sequence
  Non-cyclic GFR-binding peptide
FFLVSLSSHH

SEQ ID NO: 3322 - protein, 17 aa, Artificial Sequence
  Non-cyclic GFR-binding peptide
  MOD_RES (14), (15): Xaa is C or S
FFLMSLSSTKVPAXXTS

SEQ ID NO: 3323 - protein, 11 aa, Artificial Sequence
  Non-cyclic GFR-binding peptide
FFLMSLSSEET

SEQ ID NO: 3324 - protein, 13 aa, Artificial Sequence
  Non-cyclic GFR-binding peptide
FFLISLSSLRAPV

SEQ ID NO: 3325 - protein, 15 aa, Artificial Sequence
  Non-cyclic GFR-binding peptide
  MOD_RES (14), (15): Xaa is C or S
FFLISLSSLKTPVXX

SEQ ID NO: 3326 - protein, 14 aa, Artificial Sequence
  Non-cyclic GFR-binding peptide
  MOD_RES (14), (14): Xaa is C or S
FFLISLSSLRTPVX

SEQ ID NO: 3327 - protein, 20 aa, Artificial Sequence
  Non-cyclic GFR-binding peptide
  MOD_RES (14), (15): Xaa is C or S
FFLISLSSLKTPVXXAKSAK

SEQ ID NO: 3328 - protein, 10 aa, Artificial Sequence
  Non-cyclic GFR-binding peptide
FFLISLSSLA

SEQ ID NO: 3329 - protein, 12 aa, Artificial Sequence
  Non-cyclic GFR-binding peptide
FFLVSLSSLKTP

SEQ ID NO: 3330 - protein, 20 aa, Artificial Sequence
  Non-cyclic GFR-binding peptide
  MOD_RES (14), (15): Xaa is C or S
FFLVSLSSLKTPAXXPKPVH

SEQ ID NO: 3331 - protein, 12 aa, Artificial Sequence
  Non-cyclic GFR-binding peptide
FFLISLSSLRTP

SEQ ID NO: 3332 - protein, 15 aa, Artificial Sequence
  Non-cyclic GFR-binding peptide
  MOD_RES (14), (15): Xaa is C or S
FFLVSLSSLKTPAXX

SEQ ID NO: 3333 - protein, 14 aa, Artificial Sequence
  Non-cyclic GFR-binding peptide
  MOD_RES (14), (14): Xaa is C or S
FFLISLSSLDQSVX

SEQ ID NO: 3334 - protein, 19 aa, Artificial Sequence
  Non-cyclic GFR-binding peptide
  MOD_RES (14), (15): Xaa is C or S
FFLISLSSLRAPVXXSAPA

SEQ ID NO: 3335 - protein, 13 aa, Artificial Sequence
  Non-cyclic GFR-binding peptide
FFLMSLSSLETPV

SEQ ID NO: 3336 - protein, 18 aa, Artificial Sequence
  Non-cyclic GFR-binding peptide
  MOD_RES (14), (15): Xaa is C or S
FFLVSLSSLKTPAXXPKP

SEQ ID NO: 3337 - protein, 16 aa, Artificial Sequence
  Non-cyclic GFR-binding peptide
  MOD_RES (14), (15): Xaa is C or S
FFLVSLSSLKTPAXXA

SEQ ID NO: 3338 - protein, 19 aa, Artificial Sequence
  Non-cyclic GFR-binding peptide
  MOD_RES (14), (15): Xaa is C or S
FFLISLSSLDQSVXXPSAS

SEQ ID NO: 3339 - protein, 9 aa, Artificial Sequence
  Non-cyclic GFR-binding peptide
FFLVSLSSL

SEQ ID NO: 3340 - protein, 14 aa, Artificial Sequence
  Non-cyclic GFR-binding peptide
  MOD_RES (14), (14): Xaa is C or S
FFLISLSSLRAPVX

SEQ ID NO: 3341 - protein, 10 aa, Artificial Sequence
  Non-cyclic GFR-binding peptide
FFLISLSSLD

SEQ ID NO: 3342 - protein, 17 aa, Artificial Sequence
  Non-cyclic GFR-binding peptide
  MOD_RES (14), (15): Xaa is C or S
FFLVSLSSLKTPVXXAK

SEQ ID NO: 3343 - protein, 19 aa, Artificial Sequence
  Non-cyclic GFR-binding peptide
  MOD_RES (14), (15): Xaa is C or S
FFLVSLSSLKTPAXXPKPV

SEQ ID NO: 3344 - protein, 19 aa, Artificial Sequence
  Non-cyclic GFR-binding peptide
  MOD_RES (14), (14): Xaa is C or S
FFLMSLSSEETPVXELGED

SEQ ID NO: 3345 - protein, 14 aa, Artificial Sequence
  Non-cyclic GFR-binding peptide
  MOD_RES (14), (14): Xaa is C or S
FFLVSLSSLKTPAX

SEQ ID NO: 3346 - protein, 11 aa, Artificial Sequence
  Non-cyclic GFR-binding peptide
FFLISLSSLKT

SEQ ID NO: 3347 - protein, 18 aa, Artificial Sequence
  Non-cyclic GFR-binding peptide
  MOD_RES (14), (15): Xaa is C or S
FFLVSLSSLKTPVXXAKG

SEQ ID NO: 3348 - protein, 20 aa, Artificial Sequence
  Non-cyclic GFR-binding peptide
  MOD_RES (14), (15): Xaa is C or S
FFLISLSSLDQSVXXPSASA

SEQ ID NO: 3349 - protein, 12 aa, Artificial Sequence
  Non-cyclic GFR-binding peptide
FFLMSLSSMKTP

SEQ ID NO: 3350 - protein, 19 aa, Artificial Sequence
  Non-cyclic GFR-binding peptide
  MOD_RES (16), (16): Xaa is C or S
FFLVSLSSHHVRSPQXKVS

SEQ ID NO: 3351 - protein, 9 aa, Artificial Sequence
  Non-cyclic GFR-binding peptide
FFLMSLSST

SEQ ID NO: 3352 - protein, 13 aa, Artificial Sequence
  Non-cyclic GFR-binding peptide
FFLMSLSSEETPV

SEQ ID NO: 3353 - protein, 19 aa, Artificial Sequence
  Non-cyclic GFR-binding peptide
  MOD_RES (14), (15): Xaa is C or S
FFLMSLSSMKTPTXXPGAS

SEQ ID NO: 3354 - protein, 17 aa, Artificial Sequence
  Non-cyclic GFR-binding peptide
  MOD_RES (14), (15): Xaa is C or S
FFLMSLSSLETPVXXAK

SEQ ID NO: 3355 - protein, 20 aa, Artificial Sequence
  Non-cyclic GFR-binding peptide
  MOD_RES (14), (15): Xaa is C or S
FFLISLSSLDQPVXXPSASA

SEQ ID NO: 3356 - protein, 11 aa, Artificial Sequence
  Non-cyclic GFR-binding peptide
FFLVSLSSLKT

SEQ ID NO: 3357 - protein, 16 aa, Artificial Sequence
  Non-cyclic GFR-binding peptide
  MOD_RES (14), (15): Xaa is C or S
FFLISLSSLAQPVXXP

SEQ ID NO: 3358 - protein, 17 aa, Artificial Sequence
  Non-cyclic GFR-binding peptide
  MOD_RES (14), (15): Xaa is C or S
FFLVSLSSLKTPAXXPK

SEQ ID NO: 3359 - protein, 10 aa, Artificial Sequence
  Non-cyclic GFR-binding peptide
FFLVSLSSLQ

SEQ ID NO: 3360 - protein, 20 aa, Artificial Sequence
  Non-cyclic GFR-binding peptide
  MOD_RES (14), (15): Xaa is C or S
FFLVSLSSLKTPAXXAKPVA

SEQ ID NO: 3361 - protein, 19 aa, Artificial Sequence
  Non-cyclic GFR-binding peptide
  MOD_RES (14), (15): Xaa is C or S
FFLISLSSLRTPVXXTPPT

SEQ ID NO: 3362 - protein, 17 aa, Artificial Sequence
  Non-cyclic GFR-binding peptide
  MOD_RES (14), (15): Xaa is C or S
FFLISLSSLKTPVXXAK

SEQ ID NO: 3363 - protein, 13 aa, Artificial Sequence
  Non-cyclic GFR-binding peptide
FFLISLSSLDQPV

SEQ ID NO: 3364 - protein, 10 aa, Artificial Sequence
  Non-cyclic GFR-binding peptide
FFLMSLSSEE

SEQ ID NO: 3365 - protein, 19 aa, Artificial Sequence
  Non-cyclic GFR-binding peptide
  MOD_RES (14), (15): Xaa is C or S
FFLISLSSLKTPVXXAKSA

SEQ ID NO: 3366 - protein, 15 aa, Artificial Sequence
  Non-cyclic GFR-binding peptide
  MOD_RES (14), (14): Xaa is C or S
FFLMSLSSEETPVXE

SEQ ID NO: 3367 - protein, 20 aa, Artificial Sequence
  Non-cyclic GFR-binding peptide
  MOD_RES (14), (15): Xaa is C or S
FFLISLSSLRAPVXXSAPAA

SEQ ID NO: 3368 - protein, 9 aa, Artificial Sequence
  Non-cyclic GFR-binding peptide
FFLMSLSSM

SEQ ID NO: 3369 - protein, 20 aa, Artificial Sequence
  Non-cyclic GFR-binding peptide
  MOD_RES (14), (14): Xaa is C or S
FFLVSLSSLKTPAXTPKTVH

SEQ ID NO: 3370 - protein, 11 aa, Artificial Sequence
  Non-cyclic GFR-binding peptide
FFLISLSSLRT

SEQ ID NO: 3371 - protein, 9 aa, Artificial Sequence
  Non-cyclic GFR-binding peptide
FFLVSLSSH

SEQ ID NO: 3372 - protein, 17 aa, Artificial Sequence
  Non-cyclic GFR-binding peptide
  MOD_RES (14), (15): Xaa is C or S
FFLISLSSLDQPVXXPS

SEQ ID NO: 3373 - protein, 14 aa, Artificial Sequence
  Non-cyclic GFR-binding peptide
  MOD_RES (14), (14): Xaa is C or S
FFLMSLSSTKVPAX

SEQ ID NO: 3374 - protein, 11 aa, Artificial Sequence
  Non-cyclic GFR-binding peptide
FFLVSLSSHHV

SEQ ID NO: 3375 - protein, 12 aa, Artificial Sequence
  Non-cyclic GFR-binding peptide
PARLSSLSILFF

SEQ ID NO: 3376 - protein, 15 aa, Artificial Sequence
  Non-cyclic GFR-binding peptide
  MOD_RES (2), (2): Xaa is C or S
TXAPTKLSSLSVLFF

SEQ ID NO: 3377 - protein, 20 aa, Artificial Sequence
  Non-cyclic GFR-binding peptide
  MOD_RES (6), (7): Xaa is C or S
YVPKPXXAPTKLSSLSVLFF

SEQ ID NO: 3378 - protein, 20 aa, Artificial Sequence
  Non-cyclic GFR-binding peptide
  MOD_RES (5), (5): Xaa is C or S
SSVKXQPSRVHHSSLSVLFF

SEQ ID NO: 3379 - protein, 15 aa, Artificial Sequence
  Non-cyclic GFR-binding peptide
  MOD_RES (1), (2): Xaa is C or S
XXVPQDLSSLSILFF

SEQ ID NO: 3380 - protein, 12 aa, Artificial Sequence
  Non-cyclic GFR-binding peptide
PTELSSLSMLFF

SEQ ID NO: 3381 - protein, 10 aa, Artificial Sequence
  Non-cyclic GFR-binding peptide
KLSSLSILFF

SEQ ID NO: 3382 - protein, 20 aa, Artificial Sequence
  Non-cyclic GFR-binding peptide
  MOD_RES (6), (7): Xaa is C or S
ASAAPXXVPQALSSLSILFF

SEQ ID NO: 3383 - protein, 9 aa, Artificial Sequence
  Non-cyclic GFR-binding peptide
LSSLSMLFF

SEQ ID NO: 3384 - protein, 18 aa, Artificial Sequence
  Non-cyclic GFR-binding peptide
  MOD_RES (5), (5): Xaa is C or S
EGLEXVPTEESSLSMLFF

SEQ ID NO: 3385 - protein, 19 aa, Artificial Sequence
  Non-cyclic GFR-binding peptide
  MOD_RES (5), (6): Xaa is C or S
VPKAXXAPTKLSSLSVLFF

SEQ ID NO: 3386 - protein, 12 aa, Artificial Sequence
  Non-cyclic GFR-binding peptide
RVHHSSLSVLFF

SEQ ID NO: 3387 - protein, 15 aa, Artificial Sequence
  Non-cyclic GFR-binding peptide
  MOD_RES (1), (2): Xaa is C or S
XXVSQDLSSLSILFF

SEQ ID NO: 3388 - protein, 14 aa, Artificial Sequence
  Non-cyclic GFR-binding peptide
  MOD_RES (1), (1): Xaa is C or S
XTPTKMSSLSMLFF

SEQ ID NO: 3389 - protein, 13 aa, Artificial Sequence
  Non-cyclic GFR-binding peptide
APVKTSSLSMLFF

SEQ ID NO: 3390 - protein, 20 aa, Artificial Sequence
  Non-cyclic GFR-binding peptide
  MOD_RES (6), (7): Xaa is C or S
STPPTXXVPTRLSSLSILFF

SEQ ID NO: 3391 - protein, 11 aa, Artificial Sequence
  Non-cyclic GFR-binding peptide
QDLSSLSILFF

SEQ ID NO: 3392 - protein, 18 aa, Artificial Sequence
  Non-cyclic GFR-binding peptide
  MOD_RES (4), (5): Xaa is C or S
PKAXXAPTKLSSLSVLFF

SEQ ID NO: 3393 - protein, 19 aa, Artificial Sequence
  Non-cyclic GFR-binding peptide
  MOD_RES (5), (6): Xaa is C or S
VGKAXXVPTKLSSLSVLFF

SEQ ID NO: 3394 - protein, 16 aa, Artificial Sequence
  Non-cyclic GFR-binding peptide
  MOD_RES (2), (3): Xaa is C or S
TXXAPVKTSSLSMLFF

SEQ ID NO: 3395 - protein, 18 aa, Artificial Sequence
  Non-cyclic GFR-binding peptide
  MOD_RES (5), (5): Xaa is C or S
TKPTXAPTKLSSLSVLFF

SEQ ID NO: 3396 - protein, 12 aa, Artificial Sequence
  Non-cyclic GFR-binding peptide
SQDLSSLSILFF

SEQ ID NO: 3397 - protein, 20 aa, Artificial Sequence
  Non-cyclic GFR-binding peptide
  MOD_RES (7), (7): Xaa is C or S
NDEGLEXVPTEESSLSMLFF

SEQ ID NO: 3398 - protein, 10 aa, Artificial Sequence
  Non-cyclic GFR-binding peptide
RLSSLSILFF

SEQ ID NO: 3399 - protein, 17 aa, Artificial Sequence
  Non-cyclic GFR-binding peptide
  MOD_RES (2), (2): Xaa is C or S
KXQPSRVHHSSLSVLFF

SEQ ID NO: 3400 - protein, 20 aa, Artificial Sequence
  Non-cyclic GFR-binding peptide
  MOD_RES (6), (7): Xaa is C or S
SIPKAXXVPTELSSLSMLFF

SEQ ID NO: 3401 - protein, 13 aa, Artificial Sequence
  Non-cyclic GFR-binding peptide
VPQALSSLSILFF

SEQ ID NO: 3402 - protein, 16 aa, Artificial Sequence
  Non-cyclic GFR-binding peptide
  MOD_RES (2), (3): Xaa is C or S
PXXVPQDLSSLSILFF

SEQ ID NO: 3403 - protein, 15 aa, Artificial Sequence
  Non-cyclic GFR-binding peptide
  MOD_RES (1), (2): Xaa is C or S
XXVPARLSSLSILFF

SEQ ID NO: 3404 - protein, 11 aa, Artificial Sequence
  Non-cyclic GFR-binding peptide
TELSSLSMLFF

SEQ ID NO: 3405 - protein, 18 aa, Artificial Sequence
  Non-cyclic GFR-binding peptide
  MOD_RES (4), (5): Xaa is C or S
AGPXXTPTKMSSLSMLFF

SEQ ID NO: 3406 - protein, 9 aa, Artificial Sequence
  Non-cyclic GFR-binding peptide
ESSLSMLFF

SEQ ID NO: 3407 - protein, 17 aa, Artificial Sequence
  Non-cyclic GFR-binding peptide
  MOD_RES (4), (4): Xaa is C or S
GLEXVPTEESSLSMLFF

SEQ ID NO: 3408 - protein, 11 aa, Artificial Sequence
  Non-cyclic GFR-binding peptide
ARLSSLSILFF

SEQ ID NO: 3409 - protein, 13 aa, Artificial Sequence
  Non-cyclic GFR-binding peptide
VPTKLSSLSILFF

SEQ ID NO: 3410 - protein, 13 aa, Artificial Sequence
  Non-cyclic GFR-binding peptide
APTKLSSLSVLFF

SEQ ID NO: 3411 - protein, 15 aa, Artificial Sequence
  Non-cyclic GFR-binding peptide
  MOD_RES (1), (2): Xaa is C or S
XXVPTELSSLSMLFF

SEQ ID NO: 3412 - protein, 16 aa, Artificial Sequence
  Non-cyclic GFR-binding peptide
  MOD_RES (2), (3): Xaa is C or S
AXXVPTELSSLSMLFF

SEQ ID NO: 3413 - protein, 18 aa, Artificial Sequence
  Non-cyclic GFR-binding peptide
  MOD_RES (4), (5): Xaa is C or S
PKPXXAPTQLSSLSVLFF

SEQ ID NO: 3414 - protein, 16 aa, Artificial Sequence
  Non-cyclic GFR-binding peptide
  MOD_RES (2), (3): Xaa is C or S
PXXTPTKMSSLSMLFF

SEQ ID NO: 3415 - protein, 15 aa, Artificial Sequence
  Non-cyclic GFR-binding peptide
  MOD_RES (1), (2): Xaa is C or S
XXVPTRLSSLSILFF

SEQ ID NO: 3416 - protein, 18 aa, Artificial Sequence
  Non-cyclic GFR-binding peptide
  MOD_RES (4), (5): Xaa is C or S
PPTXXVPTRLSSLSILFF

SEQ ID NO: 3417 - protein, 13 aa, Artificial Sequence
  Non-cyclic GFR-binding peptide
APTQLSSLSVLFF

SEQ ID NO: 3418 - protein, 16 aa, Artificial Sequence
  Non-cyclic GFR-binding peptide
  MOD_RES (3), (3): Xaa is C or S
PTXAPTKLSSLSVLFF

SEQ ID NO: 3419 - protein, 15 aa, Artificial Sequence
  Non-cyclic GFR-binding peptide
  MOD_RES (1), (2): Xaa is C or S
XXVPTKLSSLSVLFF

SEQ ID NO: 3420 - protein, 10 aa, Artificial Sequence
  Non-cyclic GFR-binding peptide
KMSSLSMLFF

SEQ ID NO: 3421 - protein, 20 aa, Artificial Sequence
  Non-cyclic GFR-binding peptide
  MOD_RES (6), (7): Xaa is C or S
GSAGPXXTPTKMSSLSMLFF

SEQ ID NO: 3422 - protein, 12 aa, Artificial Sequence
  Non-cyclic GFR-binding peptide
PTQLSSLSVLFF

SEQ ID NO: 3423 - protein, 16 aa, Artificial Sequence
  Non-cyclic GFR-binding peptide
  MOD_RES (2), (3): Xaa is C or S
SXXVPARLSSLSILFF

SEQ ID NO: 3424 - protein, 14 aa, Artificial Sequence
  Non-cyclic GFR-binding peptide
  MOD_RES (1), (1): Xaa is C or S
XVPQDLSSLSILFF

SEQ ID NO: 3425 - protein, 19 aa, Artificial Sequence
  Non-cyclic GFR-binding peptide
  MOD_RES (5), (6): Xaa is C or S
VPKPXXAPTQLSSLSVLFF

SEQ ID NO: 3426 - protein, 15 aa, Artificial Sequence
  Non-cyclic GFR-binding peptide
  MOD_RES (1), (2): Xaa is C or S
XXAPVKTSSLSMLFF

SEQ ID NO: 3427 - protein, 16 aa, Artificial Sequence
  Non-cyclic GFR-binding peptide
  MOD_RES (3), (3): Xaa is C or S
LEXVPTEESSLSMLFF

SEQ ID NO: 3428 - protein, 14 aa, Artificial Sequence
  Non-cyclic GFR-binding peptide
  MOD_RES (1), (1): Xaa is C or S
XVPTELSSLSMLFF

SEQ ID NO: 3429 - protein, 14 aa, Artificial Sequence
  Non-cyclic GFR-binding peptide
  MOD_RES (1), (1): Xaa is C or S
XAPTQLSSLSVLFF

SEQ ID NO: 3430 - protein, 14 aa, Artificial Sequence
  Non-cyclic GFR-binding peptide
  MOD_RES (1), (1): Xaa is C or S
XVPQALSSLSILFF

SEQ ID NO: 3431 - protein, 10 aa, Artificial Sequence
  Non-cyclic GFR-binding peptide
KLSSLSVLFF

SEQ ID NO: 3432 - protein, 16 aa, Artificial Sequence
  Non-cyclic GFR-binding peptide
  MOD_RES (2), (3): Xaa is C or S
PXXVSQDLSSLSILFF

SEQ ID NO: 3433 - protein, 19 aa, Artificial Sequence
  Non-cyclic GFR-binding peptide
  MOD_RES (5), (6): Xaa is C or S
SASPXXVPQDLSSLSILFF

SEQ ID NO: 3434 - protein, 14 aa, Artificial Sequence
  Non-cyclic GFR-binding peptide
PSRVHHSSLSVLFF

SEQ ID NO: 3435 - protein, 18 aa, Artificial Sequence
  Non-cyclic GFR-binding peptide
  MOD_RES (4), (5): Xaa is C or S
SKAXXVPTKLSSLSILFF

SEQ ID NO: 3436 - protein, 13 aa, Artificial Sequence
  Non-cyclic GFR-binding peptide
SRVHHSSLSVLFF

SEQ ID NO: 3437 - protein, 15 aa, Artificial Sequence
  Non-cyclic GFR-binding peptide
QPSRVHHSSLSVLFF

SEQ ID NO: 3438 - protein, 16 aa, Artificial Sequence
  Non-cyclic GFR-binding peptide
  MOD_RES (2), (3): Xaa is C or S
AXXVPTKLSSLSILFF

SEQ ID NO: 3439 - protein, 14 aa, Artificial Sequence
  Non-cyclic GFR-binding peptide
  MOD_RES (1), (1): Xaa is C or S
XVPTKLSSLSILFF

SEQ ID NO: 3440 - protein, 13 aa, Artificial Sequence
  Non-cyclic GFR-binding peptide
VPTKLSSLSVLFF

SEQ ID NO: 3441 - protein, 17 aa, Artificial Sequence
  Non-cyclic GFR-binding peptide
  MOD_RES (3), (4): Xaa is C or S
KPXXAPTQLSSLSVLFF

SEQ ID NO: 3442 - protein, 11 aa, Artificial Sequence
  Non-cyclic GFR-binding peptide
TQLSSLSVLFF

SEQ ID NO: 3443 - protein, 17 aa, Artificial Sequence
  Non-cyclic GFR-binding peptide
  MOD_RES (3), (4): Xaa is C or S
KAXXAPTKLSSLSVLFF

SEQ ID NO: 3444 - protein, 13 aa, Artificial Sequence
  Non-cyclic GFR-binding peptide
VPTRLSSLSILFF

SEQ ID NO: 3445 - protein, 10 aa, Artificial Sequence
  Non-cyclic GFR-binding peptide
KTSSLSMLFF

SEQ ID NO: 3446 - protein, 15 aa, Artificial Sequence
  Non-cyclic GFR-binding peptide
  MOD_RES (1), (2): Xaa is C or S
XXTPTKMSSLSMLFF

SEQ ID NO: 3447 - protein, 18 aa, Artificial Sequence
  Non-cyclic GFR-binding peptide
  MOD_RES (4), (5): Xaa is C or S
AAPXXVPQALSSLSILFF

SEQ ID NO: 3448 - protein, 12 aa, Artificial Sequence
  Non-cyclic GFR-binding peptide
PQDLSSLSILFF

SEQ ID NO: 3449 - protein, 12 aa, Artificial Sequence
  Non-cyclic GFR-binding peptide
PTEESSLSMLFF

SEQ ID NO: 3450 - protein, 13 aa, Artificial Sequence
  Non-cyclic GFR-binding peptide
TPTKMSSLSMLFF

SEQ ID NO: 3451 - protein, 20 aa, Artificial Sequence
  Non-cyclic GFR-binding peptide
  MOD_RES (6), (7): Xaa is C or S
KIPKAXXVPTELSSLSMLFF

SEQ ID NO: 3452 - protein, 18 aa, Artificial Sequence
  Non-cyclic GFR-binding peptide
  MOD_RES (4), (5): Xaa is C or S
PSTXXAPVKTSSLSMLFF

SEQ ID NO: 3453 - protein, 16 aa, Artificial Sequence
  Non-cyclic GFR-binding peptide
  MOD_RES (2), (3): Xaa is C or S
AXXVPTKLSSLSVLFF

SEQ ID NO: 3454 - protein, 14 aa, Artificial Sequence
  Non-cyclic GFR-binding peptide
  MOD_RES (1), (1): Xaa is C or S
XVPTEESSLSMLFF

SEQ ID NO: 3455 - protein, 16 aa, Artificial Sequence
  Non-cyclic GFR-binding peptide
  MOD_RES (2), (3): Xaa is C or S
PXXAPTKLSSLSVLFF

SEQ ID NO: 3456 - protein, 17 aa, Artificial Sequence
  Non-cyclic GFR-binding peptide
  MOD_RES (3), (4): Xaa is C or S
GPXXTPTKMSSLSMLFF

SEQ ID NO: 3457 - protein, 12 aa, Artificial Sequence
  Non-cyclic GFR-binding peptide
PTKLSSLSILFF

SEQ ID NO: 3458 - protein, 20 aa, Artificial Sequence
  Non-cyclic GFR-binding peptide
  MOD_RES (6), (7): Xaa is C or S
TVPKPXXAPTQLSSLSVLFF

SEQ ID NO: 3459 - protein, 16 aa, Artificial Sequence
  Non-cyclic GFR-binding peptide
  MOD_RES (2), (3): Xaa is C or S
PXXAPTQLSSLSVLFF

SEQ ID NO: 3460 - protein, 20 aa, Artificial Sequence
  Non-cyclic GFR-binding peptide
  MOD_RES (6), (7): Xaa is C or S
KVGKAXXVPTKLSSLSVLFF

SEQ ID NO: 3461 - protein, 10 aa, Artificial Sequence
  Non-cyclic GFR-binding peptide
ELSSLSMLFF

SEQ ID NO: 3462 - protein, 16 aa, Artificial Sequence
  Non-cyclic GFR-binding peptide
  MOD_RES (1), (1): Xaa is C or S
XQPSRVHHSSLSVLFF

SEQ ID NO: 3463 - protein, 18 aa, Artificial Sequence
  Non-cyclic GFR-binding peptide
  MOD_RES (4), (5): Xaa is C or S
ASPXXVSQDLSSLSILFF

SEQ ID NO: 3464 - protein, 18 aa, Artificial Sequence
  Non-cyclic GFR-binding peptide
  MOD_RES (4), (5): Xaa is C or S
ASPXXVPQDLSSLSILFF

SEQ ID NO: 3465 - protein, 14 aa, Artificial Sequence
  Non-cyclic GFR-binding peptide
  MOD_RES (1), (1): Xaa is C or S
XVPTKLSSLSVLFF

SEQ ID NO: 3466 - protein, 15 aa, Artificial Sequence
  Non-cyclic GFR-binding peptide
  MOD_RES (1), (2): Xaa is C or S
XXVPQALSSLSILFF

SEQ ID NO: 3467 - protein, 17 aa, Artificial Sequence
  Non-cyclic GFR-binding peptide
  MOD_RES (3), (4): Xaa is C or S
SPXXVSQDLSSLSILFF

SEQ ID NO: 3468 - protein, 11 aa, Artificial Sequence
  Non-cyclic GFR-binding peptide
TKMSSLSMLFF

SEQ ID NO: 3469 - protein, 9 aa, Artificial Sequence
  Non-cyclic GFR-binding peptide
LSSLSILFF

SEQ ID NO: 3470 - protein, 20 aa, Artificial Sequence
  Non-cyclic GFR-binding peptide
  MOD_RES (6), (7): Xaa is C or S
RVPSTXXAPVKTSSLSMLFF

SEQ ID NO: 3471 - protein, 13 aa, Artificial Sequence
  Non-cyclic GFR-binding peptide
VSQDLSSLSILFF

SEQ ID NO: 3472 - protein, 17 aa, Artificial Sequence
  Non-cyclic GFR-binding peptide
  MOD_RES (4), (4): Xaa is C or S
KPTXAPTKLSSLSVLFF

SEQ ID NO: 3473 - protein, 18 aa, Artificial Sequence
  Non-cyclic GFR-binding peptide
  MOD_RES (3), (3): Xaa is C or S
VKXQPSRVHHSSLSVLFF

SEQ ID NO: 3474 - protein, 12 aa, Artificial Sequence
  Non-cyclic GFR-binding peptide
PQALSSLSILFF

SEQ ID NO: 3475 - protein, 19 aa, Artificial Sequence
  Non-cyclic GFR-binding peptide
  MOD_RES (6), (6): Xaa is C or S
VTKPTXAPTKLSSLSVLFF

SEQ ID NO: 3476 - protein, 11 aa, Artificial Sequence
  Non-cyclic GFR-binding peptide
QALSSLSILFF

SEQ ID NO: 3477 - protein, 16 aa, Artificial Sequence
  Non-cyclic GFR-binding peptide
  MOD_RES (2), (3): Xaa is C or S
TXXVPTRLSSLSILFF

SEQ ID NO: 3478 - protein, 18 aa, Artificial Sequence
  Non-cyclic GFR-binding peptide
  MOD_RES (4), (5): Xaa is C or S
PASXXVPARLSSLSILFF

SEQ ID NO: 3479 - protein, 18 aa, Artificial Sequence
  Non-cyclic GFR-binding peptide
  MOD_RES (4), (5): Xaa is C or S
PKAXXVPTELSSLSMLFF

SEQ ID NO: 3480 - protein, 11 aa, Artificial Sequence
  Non-cyclic GFR-binding peptide
VKTSSLSMLFF

SEQ ID NO: 3481 - protein, 17 aa, Artificial Sequence
  Non-cyclic GFR-binding peptide
  MOD_RES (3), (4): Xaa is C or S
ASXXVPARLSSLSILFF

SEQ ID NO: 3482 - protein, 19 aa, Artificial Sequence
  Non-cyclic GFR-binding peptide
  MOD_RES (5), (6): Xaa is C or S
SAAPXXVPQALSSLSILFF

SEQ ID NO: 3483 - protein, 17 aa, Artificial Sequence
  Non-cyclic GFR-binding peptide
  MOD_RES (3), (4): Xaa is C or S
APXXVPQALSSLSILFF

SEQ ID NO: 3484 - protein, 12 aa, Artificial Sequence
  Non-cyclic GFR-binding peptide
PVKTSSLSMLFF

SEQ ID NO: 3485 - protein, 17 aa, Artificial Sequence
  Non-cyclic GFR-binding peptide
  MOD_RES (3), (4): Xaa is C or S
PTXXVPTRLSSLSILFF

SEQ ID NO: 3486 - protein, 19 aa, Artificial Sequence
  Non-cyclic GFR-binding peptide
  MOD_RES (5), (6): Xaa is C or S
IPKAXXVPTELSSLSMLFF

SEQ ID NO: 3487 - protein, 15 aa, Artificial Sequence
  Non-cyclic GFR-binding peptide
  MOD_RES (1), (2): Xaa is C or S
XXAPTQLSSLSVLFF

SEQ ID NO: 3488 - protein, 19 aa, Artificial Sequence
  Non-cyclic GFR-binding peptide
  MOD_RES (5), (6): Xaa is C or S
VPSTXXAPVKTSSLSMLFF

SEQ ID NO: 3489 - protein, 10 aa, Artificial Sequence
  Non-cyclic GFR-binding peptide
HHSSLSVLFF

SEQ ID NO: 3490 - protein, 17 aa, Artificial Sequence
  Non-cyclic GFR-binding peptide
  MOD_RES (3), (4): Xaa is C or S
STXXAPVKTSSLSMLFF

SEQ ID NO: 3491 - protein, 11 aa, Artificial Sequence
  Non-cyclic GFR-binding peptide
TEESSLSMLFF

SEQ ID NO: 3492 - protein, 13 aa, Artificial Sequence
  Non-cyclic GFR-binding peptide
VPARLSSLSILFF

SEQ ID NO: 3493 - protein, 15 aa, Artificial Sequence
  Non-cyclic GFR-binding peptide
  MOD_RES (1), (2): Xaa is C or S
XXVPTKLSSLSILFF

SEQ ID NO: 3494 - protein, 14 aa, Artificial Sequence
  Non-cyclic GFR-binding peptide
  MOD_RES (1), (1): Xaa is C or S
XVPTRLSSLSILFF

SEQ ID NO: 3495 - protein, 20 aa, Artificial Sequence
  Non-cyclic GFR-binding peptide
  MOD_RES (6), (7): Xaa is C or S
KASKAXXVPTKLSSLSILFF

SEQ ID NO: 3496 - protein, 10 aa, Artificial Sequence
  Non-cyclic GFR-binding peptide
ALSSLSILFF

SEQ ID NO: 3497 - protein, 12 aa, Artificial Sequence
  Non-cyclic GFR-binding peptide
PTKLSSLSVLFF

SEQ ID NO: 3498 - protein, 20 aa, Artificial Sequence
  Non-cyclic GFR-binding peptide
  MOD_RES (6), (7): Xaa is C or S
HVPKPXXAPTKLSSLSVLFF

SEQ ID NO: 3499 - protein, 12 aa, Artificial Sequence
  Non-cyclic GFR-binding peptide
PTRLSSLSILFF

SEQ ID NO: 3500 - protein, 15 aa, Artificial Sequence
  Non-cyclic GFR-binding peptide
  MOD_RES (1), (2): Xaa is C or S
XXAPTKLSSLSVLFF

SEQ ID NO: 3501 - protein, 14 aa, Artificial Sequence
  Non-cyclic GFR-binding peptide
  MOD_RES (1), (1): Xaa is C or S
XVSQDLSSLSILFF

SEQ ID NO: 3502 - protein, 19 aa, Artificial Sequence
  Non-cyclic GFR-binding peptide
  MOD_RES (5), (6): Xaa is C or S
APASXXVPARLSSLSILFF

SEQ ID NO: 3503 - protein, 13 aa, Artificial Sequence
  Non-cyclic GFR-binding peptide
VPTELSSLSMLFF

SEQ ID NO: 3504 - protein, 18 aa, Artificial Sequence
  Non-cyclic GFR-binding peptide
  MOD_RES (4), (5): Xaa is C or S
PKPXXAPTKLSSLSVLFF

SEQ ID NO: 3505 - protein, 16 aa, Artificial Sequence
  Non-cyclic GFR-binding peptide
  MOD_RES (2), (3): Xaa is C or S
AXXAPTKLSSLSVLFF

SEQ ID NO: 3506 - protein, 19 aa, Artificial Sequence
  Non-cyclic GFR-binding peptide
  MOD_RES (5), (6): Xaa is C or S
SASPXXVSQDLSSLSILFF

SEQ ID NO: 3507 - protein, 9 aa, Artificial Sequence
  Non-cyclic GFR-binding peptide
LSSLSVLFF

SEQ ID NO: 3508 - protein, 14 aa, Artificial Sequence
  Non-cyclic GFR-binding peptide
  MOD_RES (1), (1): Xaa is C or S
XVPARLSSLSILFF

SEQ ID NO: 3509 - protein, 10 aa, Artificial Sequence
  Non-cyclic GFR-binding peptide
DLSSLSILFF

SEQ ID NO: 3510 - protein, 17 aa, Artificial Sequence
  Non-cyclic GFR-binding peptide
  MOD_RES (3), (4): Xaa is C or S
KAXXVPTKLSSLSVLFF

SEQ ID NO: 3511 - protein, 19 aa, Artificial Sequence
  Non-cyclic GFR-binding peptide
  MOD_RES (5), (6): Xaa is C or S
VPKPXXAPTKLSSLSVLFF

SEQ ID NO: 3512 - protein, 19 aa, Artificial Sequence
  Non-cyclic GFR-binding peptide
  MOD_RES (6), (6): Xaa is C or S
DEGLEXVPTEESSLSMLFF

SEQ ID NO: 3513 - protein, 14 aa, Artificial Sequence
  Non-cyclic GFR-binding peptide
  MOD_RES (1), (1): Xaa is C or S
XAPTKLSSLSVLFF

SEQ ID NO: 3514 - protein, 11 aa, Artificial Sequence
  Non-cyclic GFR-binding peptide
TKLSSLSILFF

SEQ ID NO: 3515 - protein, 18 aa, Artificial Sequence
  Non-cyclic GFR-binding peptide
  MOD_RES (4), (5): Xaa is C or S
GKAXXVPTKLSSLSVLFF

SEQ ID NO: 3516 - protein, 20 aa, Artificial Sequence
  Non-cyclic GFR-binding peptide
  MOD_RES (6), (7): Xaa is C or S
ASASPXXVSQDLSSLSILFF

SEQ ID NO: 3517 - protein, 12 aa, Artificial Sequence
  Non-cyclic GFR-binding peptide
PTKMSSLSMLFF

SEQ ID NO: 3518 - protein, 19 aa, Artificial Sequence
  Non-cyclic GFR-binding peptide
  MOD_RES (4), (4): Xaa is C or S
SVKXQPSRVHHSSLSVLFF

SEQ ID NO: 3519 - protein, 9 aa, Artificial Sequence
  Non-cyclic GFR-binding peptide
TSSLSMLFF

SEQ ID NO: 3520 - protein, 13 aa, Artificial Sequence
  Non-cyclic GFR-binding peptide
VPTEESSLSMLFF

SEQ ID NO: 3521 - protein, 19 aa, Artificial Sequence
  Non-cyclic GFR-binding peptide
  MOD_RES (5), (6): Xaa is C or S
SAGPXXTPTKMSSLSMLFF

SEQ ID NO: 3522 - protein, 17 aa, Artificial Sequence
  Non-cyclic GFR-binding peptide
  MOD_RES (3), (4): Xaa is C or S
KAXXVPTELSSLSMLFF

SEQ ID NO: 3523 - protein, 20 aa, Artificial Sequence
  Non-cyclic GFR-binding peptide
  MOD_RES (6), (7): Xaa is C or S
ASASPXXVPQDLSSLSILFF

SEQ ID NO: 3524 - protein, 11 aa, Artificial Sequence
  Non-cyclic GFR-binding peptide
TKLSSLSVLFF

SEQ ID NO: 3525 - protein, 16 aa, Artificial Sequence
  Non-cyclic GFR-binding peptide
  MOD_RES (2), (3): Xaa is C or S
PXXVPQALSSLSILFF

SEQ ID NO: 3526 - protein, 17 aa, Artificial Sequence
  Non-cyclic GFR-binding peptide
  MOD_RES (3), (4): Xaa is C or S
KPXXAPTKLSSLSVLFF

SEQ ID NO: 3527 - protein, 10 aa, Artificial Sequence
  Non-cyclic GFR-binding peptide
QLSSLSVLFF

SEQ ID NO: 3528 - protein, 20 aa, Artificial Sequence
  Non-cyclic GFR-binding peptide
  MOD_RES (6), (7): Xaa is C or S
AVPKAXXAPTKLSSLSVLFF

SEQ ID NO: 3529 - protein, 19 aa, Artificial Sequence
  Non-cyclic GFR-binding peptide
  MOD_RES (5), (6): Xaa is C or S
TPPTXXVPTRLSSLSILFF

SEQ ID NO: 3530 - protein, 17 aa, Artificial Sequence
  Non-cyclic GFR-binding peptide
  MOD_RES (3), (4): Xaa is C or S
KAXXVPTKLSSLSILFF

SEQ ID NO: 3531 - protein, 13 aa, Artificial Sequence
  Non-cyclic GFR-binding peptide
VPQDLSSLSILFF

SEQ ID NO: 3532 - protein, 10 aa, Artificial Sequence
  Non-cyclic GFR-binding peptide
EESSLSMLFF

SEQ ID NO: 3533 - protein, 19 aa, Artificial Sequence
  Non-cyclic GFR-binding peptide
  MOD_RES (5), (6): Xaa is C or S
ASKAXXVPTKLSSLSILFF

SEQ ID NO: 3534 - protein, 15 aa, Artificial Sequence
  Non-cyclic GFR-binding peptide
  MOD_RES (2), (2): Xaa is C or S
EXVPTEESSLSMLFF

SEQ ID NO: 3535 - protein, 20 aa, Artificial Sequence
  Non-cyclic GFR-binding peptide
  MOD_RES (6), (7): Xaa is C or S
AAPASXXVPARLSSLSILFF

SEQ ID NO: 3536 - protein, 9 aa, Artificial Sequence
  Non-cyclic GFR-binding peptide
MSSLSMLFF

SEQ ID NO: 3537 - protein, 20 aa, Artificial Sequence
  Non-cyclic GFR-binding peptide
  MOD_RES (7), (7): Xaa is C or S
HVTKPTXAPTKLSSLSVLFF

SEQ ID NO: 3538 - protein, 11 aa, Artificial Sequence
  Non-cyclic GFR-binding peptide
TRLSSLSILFF

SEQ ID NO: 3539 - protein, 9 aa, Artificial Sequence
  Non-cyclic GFR-binding peptide
HSSLSVLFF

SEQ ID NO: 3540 - protein, 17 aa, Artificial Sequence
  Non-cyclic GFR-binding peptide
  MOD_RES (3), (4): Xaa is C or S
SPXXVPQDLSSLSILFF

SEQ ID NO: 3541 - protein, 14 aa, Artificial Sequence
  Non-cyclic GFR-binding peptide
  MOD_RES (1), (1): Xaa is C or S
XAPVKTSSLSMLFF

SEQ ID NO: 3542 - protein, 11 aa, Artificial Sequence
  Non-cyclic GFR-binding peptide
VHHSSLSVLFF

SEQ ID NO: 3543 - protein, 11 aa, Artificial Sequence
  Non-cyclic GFR-binding peptide
MIQITINSLDQ

SEQ ID NO: 3544 - protein, 15 aa, Artificial Sequence
  Non-cyclic GFR-binding peptide
  MOD_RES (14), (15): Xaa is C or S
VKAIKVSRLDQSVXX

SEQ ID NO: 3545 - protein, 10 aa, Artificial Sequence
  Non-cyclic GFR-binding peptide
MIQVTINSLK

SEQ ID NO: 3546 - protein, 15 aa, Artificial Sequence
  Non-cyclic GFR-binding peptide
  MOD_RES (14), (14): Xaa is C or S
VKAVKVSRLKTPAXT

SEQ ID NO: 3547 - protein, 20 aa, Artificial Sequence
  Non-cyclic GFR-binding peptide
  MOD_RES (14), (15): Xaa is C or S
VKAVKVSRLKTPAXXPKPVY

SEQ ID NO: 3548 - protein, 12 aa, Artificial Sequence
  Non-cyclic GFR-binding peptide
VKAMKVSRLETP

SEQ ID NO: 3549 - protein, 9 aa, Artificial Sequence
  Non-cyclic GFR-binding peptide
VKAMKVSRL

SEQ ID NO: 3550 - protein, 19 aa, Artificial Sequence
  Non-cyclic GFR-binding peptide
  MOD_RES (14), (14): Xaa is C or S
IKRVQVPRLKTPAXTPKTV

SEQ ID NO: 3551 - protein, 20 aa, Artificial Sequence
  Non-cyclic GFR-binding peptide
  MOD_RES (14), (15): Xaa is C or S
MIQITINSLAQPVXXPAASA

SEQ ID NO: 3552 - protein, 19 aa, Artificial Sequence
  Non-cyclic GFR-binding peptide
  MOD_RES (14), (15): Xaa is C or S
VKAVKVSRLQTPAXXPKPV

SEQ ID NO: 3553 - protein, 11 aa, Artificial Sequence
  Non-cyclic GFR-binding peptide
MIQMTINSLET

SEQ ID NO: 3554 - protein, 16 aa, Artificial Sequence
  Non-cyclic GFR-binding peptide
  MOD_RES (14), (15): Xaa is C or S
VKAIKVSRLDQSVXXP

SEQ ID NO: 3555 - protein, 9 aa, Artificial Sequence
  Non-cyclic GFR-binding peptide
IKRIQVPRL

SEQ ID NO: 3556 - protein, 20 aa, Artificial Sequence
  Non-cyclic GFR-binding peptide
  MOD_RES (14), (14): Xaa is C or S
VKAVKVSRLKTPAXTPKTVH

SEQ ID NO: 3557 - protein, 12 aa, Artificial Sequence
  Non-cyclic GFR-binding peptide
VKAVKVSRLKTP

SEQ ID NO: 3558 - protein, 13 aa, Artificial Sequence
  Non-cyclic GFR-binding peptide
VKAVKVSRLKTPA

SEQ ID NO: 3559 - protein, 11 aa, Artificial Sequence
  Non-cyclic GFR-binding peptide
YYLVTLPELQV

SEQ ID NO: 3560 - protein, 17 aa, Artificial Sequence
  Non-cyclic GFR-binding peptide
  MOD_RES (14), (15): Xaa is C or S
IKRIQVPRLAQPVXXPA

SEQ ID NO: 3561 - protein, 15 aa, Artificial Sequence
  Non-cyclic GFR-binding peptide
YYLVTLPELQVQTPR

SEQ ID NO: 3562 - protein, 18 aa, Artificial Sequence
  Non-cyclic GFR-binding peptide
  MOD_RES (14), (15): Xaa is C or S
MIQVTINSLQTPAXXPKP

SEQ ID NO: 3563 - protein, 14 aa, Artificial Sequence
  Non-cyclic GFR-binding peptide
  MOD_RES (14), (14): Xaa is C or S
MIQMTINSLETPVX

SEQ ID NO: 3564 - protein, 13 aa, Artificial Sequence
  Non-cyclic GFR-binding peptide
VKAIKVSRLDQSV

SEQ ID NO: 3565 - protein, 14 aa, Artificial Sequence
  Non-cyclic GFR-binding peptide
  MOD_RES (14), (14): Xaa is C or S
MIQITINSLDQPVX

SEQ ID NO: 3566 - protein, 18 aa, Artificial Sequence
  Non-cyclic GFR-binding peptide
  MOD_RES (14), (14): Xaa is C or S
IKRVQVPRLKTPAXTPKT

SEQ ID NO: 3567 - protein, 14 aa, Artificial Sequence
  Non-cyclic GFR-binding peptide
  MOD_RES (14), (14): Xaa is C or S
YYLMTLPEEETPVX

SEQ ID NO: 3568 - protein, 14 aa, Artificial Sequence
  Non-cyclic GFR-binding peptide
  MOD_RES (14), (14): Xaa is C or S
IKRMQVPRLETPVX

SEQ ID NO: 3569 - protein, 17 aa, Artificial Sequence
  Non-cyclic GFR-binding peptide
  MOD_RES (14), (15): Xaa is C or S
IKRVQVPRLQTPAXXPK

SEQ ID NO: 3570 - protein, 17 aa, Artificial Sequence
  Non-cyclic GFR-binding peptide
  MOD_RES (14), (15): Xaa is C or S
IKRVQVPRLKTPAXXPK

SEQ ID NO: 3571 - protein, 17 aa, Artificial Sequence
  Non-cyclic GFR-binding peptide
  MOD_RES (16), (16): Xaa is C or S
YYVVPLPEHHVRSPQXK

SEQ ID NO: 3572 - protein, 20 aa, Artificial Sequence
  Non-cyclic GFR-binding peptide
  MOD_RES (14), (15): Xaa is C or S
IKRIQVPRLDQPVXXPSASA

SEQ ID NO: 3573 - protein, 11 aa, Artificial Sequence
  Non-cyclic GFR-binding peptide
IKRVQVPRLQT

SEQ ID NO: 3574 - protein, 17 aa, Artificial Sequence
  Non-cyclic GFR-binding peptide
  MOD_RES (14), (15): Xaa is C or S
MIQITINSLAQPVXXPA

SEQ ID NO: 3575 - protein, 16 aa, Artificial Sequence
  Non-cyclic GFR-binding peptide
  MOD_RES (14), (15): Xaa is C or S
VKAIKVSRLAQPVXXP

SEQ ID NO: 3576 - protein, 18 aa, Artificial Sequence
  Non-cyclic GFR-binding peptide
  MOD_RES (14), (15): Xaa is C or S
MIQMTINSLETPVXXAKP

SEQ ID NO: 3577 - protein, 17 aa, Artificial Sequence
  Non-cyclic GFR-binding peptide
  MOD_RES (14), (15): Xaa is C or S
MIQMTINSLETPVXXAK

SEQ ID NO: 3578 - protein, 12 aa, Artificial Sequence
  Non-cyclic GFR-binding peptide
MIQVTINSLQTP

SEQ ID NO: 3579 - protein, 17 aa, Artificial Sequence
  Non-cyclic GFR-binding peptide
  MOD_RES (14), (15): Xaa is C or S
VKAIKVSRLDQSVXXPS

SEQ ID NO: 3580 - protein, 13 aa, Artificial Sequence
  Non-cyclic GFR-binding peptide
IKRMQVPRLETPV

SEQ ID NO: 3581 - protein, 20 aa, Artificial Sequence
  Non-cyclic GFR-binding peptide
  MOD_RES (14), (15): Xaa is C or S
IKRIQVPRLAQPVXXPAASA

SEQ ID NO: 3582 - protein, 15 aa, Artificial Sequence
  Non-cyclic GFR-binding peptide
  MOD_RES (14), (15): Xaa is C or S
VKAVKVSRLKTPAXX

SEQ ID NO: 3583 - protein, 10 aa, Artificial Sequence
  Non-cyclic GFR-binding peptide
MIQMTINSLE

SEQ ID NO: 3584 - protein, 19 aa, Artificial Sequence
  Non-cyclic GFR-binding peptide
  MOD_RES (14), (15): Xaa is C or S
VKAIKVSRLDQSVXXPSAS

SEQ ID NO: 3585 - protein, 14 aa, Artificial Sequence
  Non-cyclic GFR-binding peptide
  MOD_RES (14), (14): Xaa is C or S
YYVMPLPEEETPVX

SEQ ID NO: 3586 - protein, 19 aa, Artificial Sequence
  Non-cyclic GFR-binding peptide
  MOD_RES (14), (15): Xaa is C or S
VKAMKVSRLETPVXXAKPI

SEQ ID NO: 3587 - protein, 20 aa, Artificial Sequence
  Non-cyclic GFR-binding peptide
  MOD_RES (14), (14): Xaa is C or S
YYLMTLPEEETPVXELGEDN

SEQ ID NO: 3588 - protein, 14 aa, Artificial Sequence
  Non-cyclic GFR-binding peptide
  MOD_RES (14), (14): Xaa is C or S
VKAIKVSRLAQPVX

SEQ ID NO: 3589 - protein, 15 aa, Artificial Sequence
  Non-cyclic GFR-binding peptide
  MOD_RES (14), (15): Xaa is C or S
IKRMQVPRLETPVXX

SEQ ID NO: 3590 - protein, 14 aa, Artificial Sequence
  Non-cyclic GFR-binding peptide
  MOD_RES (14), (14): Xaa is C or S
IKRIQVPRLDQSVX

SEQ ID NO: 3591 - protein, 15 aa, Artificial Sequence
  Non-cyclic GFR-binding peptide
  MOD_RES (14), (14): Xaa is C or S
YYLMTLPEEETPVXE

SEQ ID NO: 3592 - protein, 16 aa, Artificial Sequence
  Non-cyclic GFR-binding peptide
  MOD_RES (14), (15): Xaa is C or S
VKAMKVSRLETPVXXA

SEQ ID NO: 3593 - protein, 14 aa, Artificial Sequence
  Non-cyclic GFR-binding peptide
  MOD_RES (14), (14): Xaa is C or S
MIQVTINSLKTPAX

SEQ ID NO: 3594 - protein, 13 aa, Artificial Sequence
  Non-cyclic GFR-binding peptide
VKAVKVSRLQTPA

SEQ ID NO: 3595 - protein, 15 aa, Artificial Sequence
  Non-cyclic GFR-binding peptide
  MOD_RES (14), (15): Xaa is C or S
VKAVKVSRLQTPAXX

SEQ ID NO: 3596 - protein, 16 aa, Artificial Sequence
  Non-cyclic GFR-binding peptide
  MOD_RES (16), (16): Xaa is C or S
YYVVPLPELQVQTPRX

SEQ ID NO: 3597 - protein, 17 aa, Artificial Sequence
  Non-cyclic GFR-binding peptide
  MOD_RES (14), (15): Xaa is C or S
MIQITINSLDQPVXXPS

SEQ ID NO: 3598 - protein, 10 aa, Artificial Sequence
  Non-cyclic GFR-binding peptide
IKRIQVPRLD

SEQ ID NO: 3599 - protein, 12 aa, Artificial Sequence
  Non-cyclic GFR-binding peptide
YYLVTLPELQVQ

SEQ ID NO: 3600 - protein, 11 aa, Artificial Sequence
  Non-cyclic GFR-binding peptide
MIQVTINSLKT

SEQ ID NO: 3601 - protein, 13 aa, Artificial Sequence
  Non-cyclic GFR-binding peptide
IKRIQVPRLDQPV

SEQ ID NO: 3602 - protein, 12 aa, Artificial Sequence
  Non-cyclic GFR-binding peptide
VKAIKVSRLDQP

SEQ ID NO: 3603 - protein, 15 aa, Artificial Sequence
  Non-cyclic GFR-binding peptide
  MOD_RES (14), (15): Xaa is C or S
IKRIQVPRLDQPVXX

SEQ ID NO: 3604 - protein, 15 aa, Artificial Sequence
  Non-cyclic GFR-binding peptide
  MOD_RES (14), (15): Xaa is C or S
MIQMTINSLETPVXX

SEQ ID NO: 3605 - protein, 20 aa, Artificial Sequence
  Non-cyclic GFR-binding peptide
  MOD_RES (14), (15): Xaa is C or S
VKAMKVSRLETPVXXAKPIK

SEQ ID NO: 3606 - protein, 13 aa, Artificial Sequence
  Non-cyclic GFR-binding peptide
YYLMTLPEEETPV

SEQ ID NO: 3607 - protein, 12 aa, Artificial Sequence
  Non-cyclic GFR-binding peptide
VKAIKVSRLDQS

SEQ ID NO: 3608 - protein, 16 aa, Artificial Sequence
  Non-cyclic GFR-binding peptide
  MOD_RES (14), (15): Xaa is C or S
VKAIKVSRLDQPVXXP

SEQ ID NO: 3609 - protein, 19 aa, Artificial Sequence
  Non-cyclic GFR-binding peptide
  MOD_RES (14), (14): Xaa is C or S
YYLMTLPEEETPVXELGED

SEQ ID NO: 3610 - protein, 17 aa, Artificial Sequence
  Non-cyclic GFR-binding peptide
  MOD_RES (14), (15): Xaa is C or S
VKAVKVSRLQTPAXXPK

SEQ ID NO: 3611 - protein, 14 aa, Artificial Sequence
  Non-cyclic GFR-binding peptide
YYVVPLPELQVQTP

SEQ ID NO: 3612 - protein, 15 aa, Artificial Sequence
  Non-cyclic GFR-binding peptide
  MOD_RES (14), (15): Xaa is C or S
VKAIKVSRLDQPVXX

SEQ ID NO: 3613 - protein, 19 aa, Artificial Sequence
  Non-cyclic GFR-binding peptide
  MOD_RES (14), (15): Xaa is C or S
IKRMQVPRLETPVXXAKPI

SEQ ID NO: 3614 - protein, 18 aa, Artificial Sequence
  Non-cyclic GFR-binding peptide
  MOD_RES (16), (16): Xaa is C or S
YYVVPLPEHHVRSPQXKV

SEQ ID NO: 3615 - protein, 16 aa, Artificial Sequence
  Non-cyclic GFR-binding peptide
  MOD_RES (16), (16): Xaa is C or S
YYVVPLPEHHVRSPQX

SEQ ID NO: 3616 - protein, 19 aa, Artificial Sequence
  Non-cyclic GFR-binding peptide
  MOD_RES (14), (15): Xaa is C or S
MIQITINSLDQSVXXPSAS

SEQ ID NO: 3617 - protein, 12 aa, Artificial Sequence
  Non-cyclic GFR-binding peptide
YYLVTLPEHHVR

SEQ ID NO: 3618 - protein, 17 aa, Artificial Sequence
  Non-cyclic GFR-binding peptide
  MOD_RES (14), (15): Xaa is C or S
IKRIQVPRLDQSVXXPS

SEQ ID NO: 3619 - protein, 18 aa, Artificial Sequence
  Non-cyclic GFR-binding peptide
  MOD_RES (14), (14): Xaa is C or S
VKAVKVSRLKTPAXTPKT

SEQ ID NO: 3620 - protein, 10 aa, Artificial Sequence
  Non-cyclic GFR-binding peptide
IKRVQVPRLK

SEQ ID NO: 3621 - protein, 19 aa, Artificial Sequence
  Non-cyclic GFR-binding peptide
  MOD_RES (14), (15): Xaa is C or S
IKRIQVPRLDQPVXXPSAS

SEQ ID NO: 3622 - protein, 11 aa, Artificial Sequence
  Non-cyclic GFR-binding peptide
YYVVPLPEHHV

SEQ ID NO: 3623 - protein, 16 aa, Artificial Sequence
  Non-cyclic GFR-binding peptide
  MOD_RES (14), (14): Xaa is C or S
VKAVKVSRLKTPAXTP

SEQ ID NO: 3624 - protein, 11 aa, Artificial Sequence
  Non-cyclic GFR-binding peptide
IKRIQVPRLDQ

SEQ ID NO: 3625 - protein, 11 aa, Artificial Sequence
  Non-cyclic GFR-binding peptide
YYVMPLPEEET

SEQ ID NO: 3626 - protein, 10 aa, Artificial Sequence
  Non-cyclic GFR-binding peptide
YYLVTLPEHH

SEQ ID NO: 3627 - protein, 11 aa, Artificial Sequence
  Non-cyclic GFR-binding peptide
MIQVTINSLQT

SEQ ID NO: 3628 - protein, 17 aa, Artificial Sequence
  Non-cyclic GFR-binding peptide
  MOD_RES (14), (14): Xaa is C or S
YYLMTLPEEETPVXELG

SEQ ID NO: 3629 - protein, 18 aa, Artificial Sequence
  Non-cyclic GFR-binding peptide
  MOD_RES (14), (14): Xaa is C or S
YYLMTLPEEETPVXELGE

SEQ ID NO: 3630 - protein, 18 aa, Artificial Sequence
  Non-cyclic GFR-binding peptide
  MOD_RES (14), (15): Xaa is C or S
VKAVKVSRLKTPAXXPKP

SEQ ID NO: 3631 - protein, 15 aa, Artificial Sequence
  Non-cyclic GFR-binding peptide
YYLVTLPEHHVRSPQ

SEQ ID NO: 3632 - protein, 16 aa, Artificial Sequence
  Non-cyclic GFR-binding peptide
  MOD_RES (14), (15): Xaa is C or S
IKRVQVPRLKTPAXXP

SEQ ID NO: 3633 - protein, 13 aa, Artificial Sequence
  Non-cyclic GFR-binding peptide
VKAIKVSRLDQPV

SEQ ID NO: 3634 - protein, 10 aa, Artificial Sequence
  Non-cyclic GFR-binding peptide
VKAIKVSRLD

SEQ ID NO: 3635 - protein, 11 aa, Artificial Sequence
  Non-cyclic GFR-binding peptide
VKAIKVSRLAQ

SEQ ID NO: 3636 - protein, 20 aa, Artificial Sequence
  Non-cyclic GFR-binding peptide
  MOD_RES (14), (15): Xaa is C or S
MIQVTINSLQTPAXXPKPVT

SEQ ID NO: 3637 - protein, 12 aa, Artificial Sequence
  Non-cyclic GFR-binding peptide
IKRMQVPRLETP

SEQ ID NO: 3638 - protein, 20 aa, Artificial Sequence
  Non-cyclic GFR-binding peptide
  MOD_RES (14), (14): Xaa is C or S
YYVMPLPEEETPVXELGEDN

SEQ ID NO: 3639 - protein, 16 aa, Artificial Sequence
  Non-cyclic GFR-binding peptide
  MOD_RES (14), (15): Xaa is C or S
VKAVKVSRLKTPAXXP

SEQ ID NO: 3640 - protein, 18 aa, Artificial Sequence
  Non-cyclic GFR-binding peptide
  MOD_RES (14), (14): Xaa is C or S
YYVMPLPEEETPVXELGE

SEQ ID NO: 3641 - protein, 17 aa, Artificial Sequence
  Non-cyclic GFR-binding peptide
  MOD_RES (14), (15): Xaa is C or S
MIQITINSLDQSVXXPS

SEQ ID NO: 3642 - protein, 12 aa, Artificial Sequence
  Non-cyclic GFR-binding peptide
YYVVPLPEHHVR

SEQ ID NO: 3643 - protein, 16 aa, Artificial Sequence
  Non-cyclic GFR-binding peptide
  MOD_RES (14), (14): Xaa is C or S
IKRVQVPRLKTPAXTP

SEQ ID NO: 3644 - protein, 14 aa, Artificial Sequence
  Non-cyclic GFR-binding peptide
YYLVTLPEHHVRSP

SEQ ID NO: 3645 - protein, 15 aa, Artificial Sequence
  Non-cyclic GFR-binding peptide
YYVVPLPEHHVRSPQ

SEQ ID NO: 3646 - protein, 16 aa, Artificial Sequence
  Non-cyclic GFR-binding peptide
  MOD_RES (14), (15): Xaa is C or S
VKAVKVSRLQTPAXXP

SEQ ID NO: 3647 - protein, 15 aa, Artificial Sequence
  Non-cyclic GFR-binding peptide
  MOD_RES (14), (15): Xaa is C or S
VKAIKVSRLAQPVXX

SEQ ID NO: 3648 - protein, 13 aa, Artificial Sequence
  Non-cyclic GFR-binding peptide
MIQMTINSLETPV

SEQ ID NO: 3649 - protein, 10 aa, Artificial Sequence
  Non-cyclic GFR-binding peptide
VKAIKVSRLA

SEQ ID NO: 3650 - protein, 15 aa, Artificial Sequence
  Non-cyclic GFR-binding peptide
  MOD_RES (14), (15): Xaa is C or S
IKRIQVPRLDQSVXX

SEQ ID NO: 3651 - protein, 18 aa, Artificial Sequence
  Non-cyclic GFR-binding peptide
  MOD_RES (16), (16): Xaa is C or S
YYLVTLPEHHVRSPQXKV

SEQ ID NO: 3652 - protein, 12 aa, Artificial Sequence
  Non-cyclic GFR-binding peptide
MIQVTINSLKTP

SEQ ID NO: 3653 - protein, 20 aa, Artificial Sequence
  Non-cyclic GFR-binding peptide
  MOD_RES (16), (16): Xaa is C or S
YYVVPLPEHHVRSPQXKVSS

SEQ ID NO: 3654 - protein, 20 aa, Artificial Sequence
  Non-cyclic GFR-binding peptide
  MOD_RES (14), (15): Xaa is C or S
IKRVQVPRLKTPAXXPKPVY

SEQ ID NO: 3655 - protein, 16 aa, Artificial Sequence
  Non-cyclic GFR-binding peptide
  MOD_RES (14), (15): Xaa is C or S
IKRIQVPRLDQPVXXP

SEQ ID NO: 3656 - protein, 12 aa, Artificial Sequence
  Non-cyclic GFR-binding peptide
YYVVPLPELQVQ

SEQ ID NO: 3657 - protein, 11 aa, Artificial Sequence
  Non-cyclic GFR-binding peptide
YYLMTLPEEET

SEQ ID NO: 3658 - protein, 12 aa, Artificial Sequence
  Non-cyclic GFR-binding peptide
IKRVQVPRLQTP

SEQ ID NO: 3659 - protein, 11 aa, Artificial Sequence
  Non-cyclic GFR-binding peptide
IKRIQVPRLAQ

SEQ ID NO: 3660 - protein, 14 aa, Artificial Sequence
  Non-cyclic GFR-binding peptide
  MOD_RES (14), (14): Xaa is C or S
VKAIKVSRLDQSVX

SEQ ID NO: 3661 - protein, 20 aa, Artificial Sequence
  Non-cyclic GFR-binding peptide
  MOD_RES (14), (15): Xaa is C or S
MIQITINSLDQPVXXPSASA

SEQ ID NO: 3662 - protein, 19 aa, Artificial Sequence
  Non-cyclic GFR-binding peptide
  MOD_RES (14), (15): Xaa is C or S
MIQITINSLAQPVXXPAAS

SEQ ID NO: 3663 - protein, 13 aa, Artificial Sequence
  Non-cyclic GFR-binding peptide
IKRIQVPRLDQSV

SEQ ID NO: 3664 - protein, 17 aa, Artificial Sequence
  Non-cyclic GFR-binding peptide
  MOD_RES (14), (15): Xaa is C or S
IKRIQVPRLDQPVXXPS

SEQ ID NO: 3665 - protein, 19 aa, Artificial Sequence
  Non-cyclic GFR-binding peptide
  MOD_RES (14), (14): Xaa is C or S
YYVMPLPEEETPVXELGED

SEQ ID NO: 3666 - protein, 18 aa, Artificial Sequence
  Non-cyclic GFR-binding peptide
  MOD_RES (14), (15): Xaa is C or S
VKAIKVSRLAQPVXXPAA

SEQ ID NO: 3667 - protein, 13 aa, Artificial Sequence
  Non-cyclic GFR-binding peptide
YYVMPLPEEETPV

SEQ ID NO: 3668 - protein, 13 aa, Artificial Sequence
  Non-cyclic GFR-binding peptide
VKAIKVSRLAQPV

SEQ ID NO: 3669 - protein, 13 aa, Artificial Sequence
  Non-cyclic GFR-binding peptide
YYVVPLPEHHVRS

SEQ ID NO: 3670 - protein, 10 aa, Artificial Sequence
  Non-cyclic GFR-binding peptide
IKRMQVPRLE

SEQ ID NO: 3671 - protein, 16 aa, Artificial Sequence
  Non-cyclic GFR-binding peptide
  MOD_RES (16), (16): Xaa is C or S
YYLVTLPEHHVRSPQX

SEQ ID NO: 3672 - protein, 9 aa, Artificial Sequence
  Non-cyclic GFR-binding peptide
YYVMPLPEE

SEQ ID NO: 3673 - protein, 19 aa, Artificial Sequence
  Non-cyclic GFR-binding peptide
  MOD_RES (14), (15): Xaa is C or S
VKAIKVSRLDQPVXXPSAS

SEQ ID NO: 3674 - protein, 17 aa, Artificial Sequence
  Non-cyclic GFR-binding peptide
  MOD_RES (14), (14): Xaa is C or S
YYVMPLPEEETPVXELG

SEQ ID NO: 3675 - protein, 10 aa, Artificial Sequence
  Non-cyclic GFR-binding peptide
IKRIQVPRLA

SEQ ID NO: 3676 - protein, 16 aa, Artificial Sequence
  Non-cyclic GFR-binding peptide
  MOD_RES (14), (15): Xaa is C or S
IKRIQVPRLAQPVXXP

SEQ ID NO: 3677 - protein, 20 aa, Artificial Sequence
  Non-cyclic GFR-binding peptide
  MOD_RES (14), (15): Xaa is C or S
MIQMTINSLETPVXXAKPIS

SEQ ID NO: 3678 - protein, 12 aa, Artificial Sequence
  Non-cyclic GFR-binding peptide
MIQMTINSLETP

SEQ ID NO: 3679 - protein, 20 aa, Artificial Sequence
  Non-cyclic GFR-binding peptide
  MOD_RES (14), (15): Xaa is C or S
VKAIKVSRLDQPVXXPSASA

SEQ ID NO: 3680 - protein, 17 aa, Artificial Sequence
  Non-cyclic GFR-binding peptide
  MOD_RES (14), (15): Xaa is C or S
VKAVKVSRLKTPAXXPK

SEQ ID NO: 3681 - protein, 19 aa, Artificial Sequence
  Non-cyclic GFR-binding peptide
  MOD_RES (14), (15): Xaa is C or S
IKRIQVPRLDQSVXXPSAS

SEQ ID NO: 3682 - protein, 9 aa, Artificial Sequence
  Non-cyclic GFR-binding peptide
MIQMTINSL

SEQ ID NO: 3683 - protein, 15 aa, Artificial Sequence
  Non-cyclic GFR-binding peptide
  MOD_RES (14), (14): Xaa is C or S
MIQVTINSLKTPAXT

SEQ ID NO: 3684 - protein, 20 aa, Artificial Sequence
  Non-cyclic GFR-binding peptide
  MOD_RES (14), (15): Xaa is C or S
VKAIKVSRLAQPVXXPAASA

SEQ ID NO: 3685 - protein, 13 aa, Artificial Sequence
  Non-cyclic GFR-binding peptide
IKRVQVPRLQTPA

SEQ ID NO: 3686 - protein, 13 aa, Artificial Sequence
  Non-cyclic GFR-binding peptide
MIQVTINSLKTPA

SEQ ID NO: 3687 - protein, 15 aa, Artificial Sequence
  Non-cyclic GFR-binding peptide
  MOD_RES (14), (15): Xaa is C or S
IKRIQVPRLAQPVXX

SEQ ID NO: 3688 - protein, 14 aa, Artificial Sequence
  Non-cyclic GFR-binding peptide
  MOD_RES (14), (14): Xaa is C or S
VKAMKVSRLETPVX

SEQ ID NO: 3689 - protein, 11 aa, Artificial Sequence
  Non-cyclic GFR-binding peptide
VKAIKVSRLDQ

SEQ ID NO: 3690 - protein, 14 aa, Artificial Sequence
  Non-cyclic GFR-binding peptide
  MOD_RES (14), (14): Xaa is C or S
MIQITINSLAQPVX

SEQ ID NO: 3691 - protein, 20 aa, Artificial Sequence
  Non-cyclic GFR-binding peptide
  MOD_RES (14), (15): Xaa is C or S
MIQVTINSLKTPAXXPKPVY

SEQ ID NO: 3692 - protein, 18 aa, Artificial Sequence
  Non-cyclic GFR-binding peptide
  MOD_RES (14), (15): Xaa is C or S
IKRIQVPRLDQPVXXPSA

SEQ ID NO: 3693 - protein, 17 aa, Artificial Sequence
  Non-cyclic GFR-binding peptide
  MOD_RES (16), (16): Xaa is C or S
YYLVTLPELQVQTPRXQ

SEQ ID NO: 3694 - protein, 18 aa, Artificial Sequence
  Non-cyclic GFR-binding peptide
  MOD_RES (16), (16): Xaa is C or S
YYLVTLPELQVQTPRXQV

SEQ ID NO: 3695 - protein, 16 aa, Artificial Sequence
  Non-cyclic GFR-binding peptide
  MOD_RES (14), (15): Xaa is C or S
MIQITINSLDQSVXXP

SEQ ID NO: 3696 - protein, 11 aa, Artificial Sequence
  Non-cyclic GFR-binding peptide
VKAMKVSRLET

SEQ ID NO: 3697 - protein, 20 aa, Artificial Sequence
  Non-cyclic GFR-binding peptide
  MOD_RES (16), (16): Xaa is C or S
YYLVTLPELQVQTPRXQVNR

SEQ ID NO: 3698 - protein, 18 aa, Artificial Sequence
  Non-cyclic GFR-binding peptide
  MOD_RES (14), (15): Xaa is C or S
IKRIQVPRLAQPVXXPAA

SEQ ID NO: 3699 - protein, 14 aa, Artificial Sequence
  Non-cyclic GFR-binding peptide
  MOD_RES (14), (14): Xaa is C or S
MIQVTINSLQTPAX

SEQ ID NO: 3700 - protein, 19 aa, Artificial Sequence
  Non-cyclic GFR-binding peptide
  MOD_RES (14), (15): Xaa is C or S
MIQITINSLDQPVXXPSAS

SEQ ID NO: 3701 - protein, 17 aa, Artificial Sequence
  Non-cyclic GFR-binding peptide
  MOD_RES (14), (15): Xaa is C or S
VKAIKVSRLAQPVXXPA

SEQ ID NO: 3702 - protein, 13 aa, Artificial Sequence
  Non-cyclic GFR-binding peptide
YYLVTLPEHHVRS

SEQ ID NO: 3703 - protein, 16 aa, Artificial Sequence
  Non-cyclic GFR-binding peptide
  MOD_RES (14), (15): Xaa is C or S
MIQMTINSLETPVXXA

SEQ ID NO: 3704 - protein, 19 aa, Artificial Sequence
  Non-cyclic GFR-binding peptide
  MOD_RES (14), (15): Xaa is C or S
MIQVTINSLQTPAXXPKPV

SEQ ID NO: 3705 - protein, 17 aa, Artificial Sequence
  Non-cyclic GFR-binding peptide
  MOD_RES (14), (15): Xaa is C or S
VKAIKVSRLDQPVXXPS

SEQ ID NO: 3706 - protein, 11 aa, Artificial Sequence
  Non-cyclic GFR-binding peptide
VKAVKVSRLKT

SEQ ID NO: 3707 - protein, 17 aa, Artificial Sequence
  Non-cyclic GFR-binding peptide
  MOD_RES (14), (15): Xaa is C or S
VKAMKVSRLETPVXXAK

SEQ ID NO: 3708 - protein, 20 aa, Artificial Sequence
  Non-cyclic GFR-binding peptide
  MOD_RES (14), (15): Xaa is C or S
IKRVQVPRLQTPAXXPKPVT

SEQ ID NO: 3709 - protein, 12 aa, Artificial Sequence
  Non-cyclic GFR-binding peptide
YYLMTLPEEETP

SEQ ID NO: 3710 - protein, 12 aa, Artificial Sequence
  Non-cyclic GFR-binding peptide
MIQITINSLDQP

SEQ ID NO: 3711 - protein, 16 aa, Artificial Sequence
  Non-cyclic GFR-binding peptide
  MOD_RES (14), (15): Xaa is C or S
MIQVTINSLKTPAXXP

SEQ ID NO: 3712 - protein, 19 aa, Artificial Sequence
  Non-cyclic GFR-binding peptide
  MOD_RES (14), (15): Xaa is C or S
IKRVQVPRLQTPAXXPKPV

SEQ ID NO: 3713 - protein, 20 aa, Artificial Sequence
  Non-cyclic GFR-binding peptide
  MOD_RES (16), (16): Xaa is C or S
YYLVTLPEHHVRSPQXKVSS

SEQ ID NO: 3714 - protein, 11 aa, Artificial Sequence
  Non-cyclic GFR-binding peptide
MIQITINSLAQ

SEQ ID NO: 3715 - protein, 15 aa, Artificial Sequence
  Non-cyclic GFR-binding peptide
  MOD_RES (14), (15): Xaa is C or S
MIQVTINSLQTPAXX

SEQ ID NO: 3716 - protein, 16 aa, Artificial Sequence
  Non-cyclic GFR-binding peptide
  MOD_RES (14), (15): Xaa is C or S
IKRIQVPRLDQSVXXP

SEQ ID NO: 3717 - protein, 12 aa, Artificial Sequence
  Non-cyclic GFR-binding peptide
VKAIKVSRLAQP

SEQ ID NO: 3718 - protein, 18 aa, Artificial Sequence
  Non-cyclic GFR-binding peptide
  MOD_RES (14), (15): Xaa is C or S
MIQITINSLAQPVXXPAA

SEQ ID NO: 3719 - protein, 19 aa, Artificial Sequence
  Non-cyclic GFR-binding peptide
  MOD_RES (14), (14): Xaa is C or S
VKAVKVSRLKTPAXTPKTV

SEQ ID NO: 3720 - protein, 13 aa, Artificial Sequence
  Non-cyclic GFR-binding peptide
MIQITINSLDQSV

SEQ ID NO: 3721 - protein, 18 aa, Artificial Sequence
  Non-cyclic GFR-binding peptide
  MOD_RES (16), (16): Xaa is C or S
YYVVPLPELQVQTPRXQV

SEQ ID NO: 3722 - protein, 18 aa, Artificial Sequence
  Non-cyclic GFR-binding peptide
  MOD_RES (14), (15): Xaa is C or S
VKAIKVSRLDQSVXXPSA

SEQ ID NO: 3723 - protein, 12 aa, Artificial Sequence
  Non-cyclic GFR-binding peptide
IKRIQVPRLDQS

SEQ ID NO: 3724 - protein, 19 aa, Artificial Sequence
  Non-cyclic GFR-binding peptide
  MOD_RES (16), (16): Xaa is C or S
YYVVPLPEHHVRSPQXKVS

SEQ ID NO: 3725 - protein, 9 aa, Artificial Sequence
  Non-cyclic GFR-binding peptide
VKAIKVSRL

SEQ ID NO: 3726 - protein, 12 aa, Artificial Sequence
  Non-cyclic GFR-binding peptide
IKRVQVPRLKTP

SEQ ID NO: 3727 - protein, 14 aa, Artificial Sequence
  Non-cyclic GFR-binding peptide
  MOD_RES (14), (14): Xaa is C or S
VKAVKVSRLKTPAX

SEQ ID NO: 3728 - protein, 18 aa, Artificial Sequence
  Non-cyclic GFR-binding peptide
  MOD_RES (14), (15): Xaa is C or S
MIQITINSLDQPVXXPSA

SEQ ID NO: 3729 - protein, 18 aa, Artificial Sequence
  Non-cyclic GFR-binding peptide
  MOD_RES (14), (15): Xaa is C or S
IKRVQVPRLKTPAXXPKP

SEQ ID NO: 3730 - protein, 16 aa, Artificial Sequence
  Non-cyclic GFR-binding peptide
  MOD_RES (14), (14): Xaa is C or S
MIQVTINSLKTPAXTP

SEQ ID NO: 3731 - protein, 9 aa, Artificial Sequence
  Non-cyclic GFR-binding peptide
IKRMQVPRL

SEQ ID NO: 3732 - protein, 12 aa, Artificial Sequence
  Non-cyclic GFR-binding peptide
YYVMPLPEEETP

SEQ ID NO: 3733 - protein, 10 aa, Artificial Sequence
  Non-cyclic GFR-binding peptide
VKAMKVSRLE

SEQ ID NO: 3734 - protein, 9 aa, Artificial Sequence
  Non-cyclic GFR-binding peptide
YYLMTLPEE

SEQ ID NO: 3735 - protein, 12 aa, Artificial Sequence
  Non-cyclic GFR-binding peptide
VKAVKVSRLQTP

SEQ ID NO: 3736 - protein, 19 aa, Artificial Sequence
  Non-cyclic GFR-binding peptide
  MOD_RES (14), (15): Xaa is C or S
MIQMTINSLETPVXXAKPI

SEQ ID NO: 3737 - protein, 13 aa, Artificial Sequence
  Non-cyclic GFR-binding peptide
IKRIQVPRLAQPV

SEQ ID NO: 3738 - protein, 11 aa, Artificial Sequence
  Non-cyclic GFR-binding peptide
YYLVTLPEHHV

SEQ ID NO: 3739 - protein, 10 aa, Artificial Sequence
  Non-cyclic GFR-binding peptide
VKAVKVSRLK

SEQ ID NO: 3740 - protein, 19 aa, Artificial Sequence
  Non-cyclic GFR-binding peptide
  MOD_RES (14), (15): Xaa is C or S
MIQVTINSLKTPAXXPKPV

SEQ ID NO: 3741 - protein, 16 aa, Artificial Sequence
  Non-cyclic GFR-binding peptide
  MOD_RES (14), (15): Xaa is C or S
MIQITINSLAQPVXXP

SEQ ID NO: 3742 - protein, 18 aa, Artificial Sequence
  Non-cyclic GFR-binding peptide
  MOD_RES (14), (15): Xaa is C or S
VKAVKVSRLQTPAXXPKP

SEQ ID NO: 3743 - protein, 16 aa, Artificial Sequence
  Non-cyclic GFR-binding peptide
  MOD_RES (14), (15): Xaa is C or S
MIQITINSLDQPVXXP

SEQ ID NO: 3744 - protein, 14 aa, Artificial Sequence
  Non-cyclic GFR-binding peptide
YYVVPLPEHHVRSP

SEQ ID NO: 3745 - protein, 17 aa, Artificial Sequence
  Non-cyclic GFR-binding peptide
  MOD_RES (14), (14): Xaa is C or S
MIQVTINSLKTPAXTPK

SEQ ID NO: 3746 - protein, 20 aa, Artificial Sequence
  Non-cyclic GFR-binding peptide
  MOD_RES (14), (15): Xaa is C or S
MIQITINSLDQSVXXPSASA

SEQ ID NO: 3747 - protein, 20 aa, Artificial Sequence
  Non-cyclic GFR-binding peptide
  MOD_RES (14), (14): Xaa is C or S
IKRVQVPRLKTPAXTPKTVH

SEQ ID NO: 3748 - protein, 16 aa, Artificial Sequence
  Non-cyclic GFR-binding peptide
  MOD_RES (14), (15): Xaa is C or S
IKRVQVPRLQTPAXXP

SEQ ID NO: 3749 - protein, 15 aa, Artificial Sequence
  Non-cyclic GFR-binding peptide
  MOD_RES (14), (15): Xaa is C or S
MIQITINSLDQSVXX

SEQ ID NO: 3750 - protein, 16 aa, Artificial Sequence
  Non-cyclic GFR-binding peptide
  MOD_RES (14), (14): Xaa is C or S
YYVMPLPEEETPVXEL

SEQ ID NO: 3751 - protein, 17 aa, Artificial Sequence
  Non-cyclic GFR-binding peptide
  MOD_RES (16), (16): Xaa is C or S
YYVVPLPELQVQTPRXQ

SEQ ID NO: 3752 - protein, 15 aa, Artificial Sequence
  Non-cyclic GFR-binding peptide
  MOD_RES (14), (14): Xaa is C or S
IKRVQVPRLKTPAXT

SEQ ID NO: 3753 - protein, 14 aa, Artificial Sequence
  Non-cyclic GFR-binding peptide
  MOD_RES (14), (14): Xaa is C or S
VKAIKVSRLDQPVX

SEQ ID NO: 3754 - protein, 13 aa, Artificial Sequence
  Non-cyclic GFR-binding peptide
MIQITINSLAQPV

SEQ ID NO: 3755 - protein, 10 aa, Artificial Sequence
  Non-cyclic GFR-binding peptide
YYVMPLPEEE

SEQ ID NO: 3756 - protein, 10 aa, Artificial Sequence
  Non-cyclic GFR-binding peptide
YYVVPLPEHH

SEQ ID NO: 3757 - protein, 14 aa, Artificial Sequence
  Non-cyclic GFR-binding peptide
  MOD_RES (14), (14): Xaa is C or S
IKRVQVPRLQTPAX

SEQ ID NO: 3758 - protein, 19 aa, Artificial Sequence
  Non-cyclic GFR-binding peptide
  MOD_RES (14), (15): Xaa is C or S
IKRIQVPRLAQPVXXPAAS

SEQ ID NO: 3759 - protein, 18 aa, Artificial Sequence
  Non-cyclic GFR-binding peptide
  MOD_RES (14), (14): Xaa is C or S
MIQVTINSLKTPAXTPKT

SEQ ID NO: 3760 - protein, 11 aa, Artificial Sequence
  Non-cyclic GFR-binding peptide
VKAVKVSRLQT

SEQ ID NO: 3761 - protein, 15 aa, Artificial Sequence
  Non-cyclic GFR-binding peptide
  MOD_RES (14), (15): Xaa is C or S
MIQITINSLDQPVXX

SEQ ID NO: 3762 - protein, 13 aa, Artificial Sequence
  Non-cyclic GFR-binding peptide
IKRVQVPRLKTPA

SEQ ID NO: 3763 - protein, 11 aa, Artificial Sequence
  Non-cyclic GFR-binding peptide
IKRMQVPRLET

SEQ ID NO: 3764 - protein, 13 aa, Artificial Sequence
  Non-cyclic GFR-binding peptide
MIQVTINSLQTPA

SEQ ID NO: 3765 - protein, 13 aa, Artificial Sequence
  Non-cyclic GFR-binding peptide
YYLVTLPELQVQT

SEQ ID NO: 3766 - protein, 15 aa, Artificial Sequence
  Non-cyclic GFR-binding peptide
  MOD_RES (14), (15): Xaa is C or S
VKAMKVSRLETPVXX

SEQ ID NO: 3767 - protein, 9 aa, Artificial Sequence
  Non-cyclic GFR-binding peptide
YYVVPLPEH

SEQ ID NO: 3768 - protein, 20 aa, Artificial Sequence
  Non-cyclic GFR-binding peptide
  MOD_RES (14), (15): Xaa is C or S
IKRMQVPRLETPVXXAKPIS

SEQ ID NO: 3769 - protein, 17 aa, Artificial Sequence
  Non-cyclic GFR-binding peptide
  MOD_RES (14), (14): Xaa is C or S
IKRVQVPRLKTPAXTPK

SEQ ID NO: 3770 - protein, 12 aa, Artificial Sequence
  Non-cyclic GFR-binding peptide
MIQITINSLDQS

SEQ ID NO: 3771 - protein, 16 aa, Artificial Sequence
  Non-cyclic GFR-binding peptide
  MOD_RES (14), (15): Xaa is C or S
IKRMQVPRLETPVXXA

SEQ ID NO: 3772 - protein, 14 aa, Artificial Sequence
  Non-cyclic GFR-binding peptide
YYLVTLPELQVQTP

SEQ ID NO: 3773 - protein, 15 aa, Artificial Sequence
  Non-cyclic GFR-binding peptide
  MOD_RES (14), (15): Xaa is C or S
IKRVQVPRLKTPAXX

SEQ ID NO: 3774 - protein, 10 aa, Artificial Sequence
  Non-cyclic GFR-binding peptide
MIQITINSLA

SEQ ID NO: 3775 - protein, 19 aa, Artificial Sequence
  Non-cyclic GFR-binding peptide
  MOD_RES (16), (16): Xaa is C or S
YYVVPLPELQVQTPRXQVN

SEQ ID NO: 3776 - protein, 13 aa, Artificial Sequence
  Non-cyclic GFR-binding peptide
YYVVPLPELQVQT

SEQ ID NO: 3777 - protein, 17 aa, Artificial Sequence
  Non-cyclic GFR-binding peptide
  MOD_RES (14), (15): Xaa is C or S
MIQVTINSLQTPAXXPK

SEQ ID NO: 3778 - protein, 19 aa, Artificial Sequence
  Non-cyclic GFR-binding peptide
  MOD_RES (14), (14): Xaa is C or S
MIQVTINSLKTPAXTPKTV

SEQ ID NO: 3779 - protein, 19 aa, Artificial Sequence
  Non-cyclic GFR-binding peptide
  MOD_RES (14), (15): Xaa is C or S
VKAVKVSRLKTPAXXPKPV

SEQ ID NO: 3780 - protein, 20 aa, Artificial Sequence
  Non-cyclic GFR-binding peptide
  MOD_RES (14), (15): Xaa is C or S
VKAIKVSRLDQSVXXPSASA

SEQ ID NO: 3781 - protein, 12 aa, Artificial Sequence
  Non-cyclic GFR-binding peptide
IKRIQVPRLAQP

SEQ ID NO: 3782 - protein, 14 aa, Artificial Sequence
  Non-cyclic GFR-binding peptide
  MOD_RES (14), (14): Xaa is C or S
IKRIQVPRLAQPVX

SEQ ID NO: 3783 - protein, 18 aa, Artificial Sequence
  Non-cyclic GFR-binding peptide
  MOD_RES (14), (15): Xaa is C or S
IKRMQVPRLETPVXXAKP

SEQ ID NO: 3784 - protein, 20 aa, Artificial Sequence
  Non-cyclic GFR-binding peptide
  MOD_RES (14), (15): Xaa is C or S
MIQMTINSLETPVXXAKPIK

SEQ ID NO: 3785 - protein, 18 aa, Artificial Sequence
  Non-cyclic GFR-binding peptide
  MOD_RES (14), (15): Xaa is C or S
IKRIQVPRLDQSVXXPSA

SEQ ID NO: 3786 - protein, 15 aa, Artificial Sequence
  Non-cyclic GFR-binding peptide
  MOD_RES (14), (15): Xaa is C or S
MIQVTINSLKTPAXX

SEQ ID NO: 3787 - protein, 20 aa, Artificial Sequence
  Non-cyclic GFR-binding peptide
  MOD_RES (14), (15): Xaa is C or S
IKRIQVPRLDQSVXXPSASA

SEQ ID NO: 3788 - protein, 13 aa, Artificial Sequence
  Non-cyclic GFR-binding peptide
MIQITINSLDQPV

SEQ ID NO: 3789 - protein, 11 aa, Artificial Sequence
  Non-cyclic GFR-binding peptide
YYVVPLPELQV

SEQ ID NO: 3790 - protein, 20 aa, Artificial Sequence
  Non-cyclic GFR-binding peptide
  MOD_RES (16), (16): Xaa is C or S
YYVVPLPELQVQTPRXQVNR

SEQ ID NO: 3791 - protein, 19 aa, Artificial Sequence
  Non-cyclic GFR-binding peptide
  MOD_RES (14), (15): Xaa is C or S
IKRVQVPRLKTPAXXPKPV

SEQ ID NO: 3792 - protein, 17 aa, Artificial Sequence
  Non-cyclic GFR-binding peptide
  MOD_RES (14), (14): Xaa is C or S
VKAVKVSRLKTPAXTPK

SEQ ID NO: 3793 - protein, 20 aa, Artificial Sequence
  Non-cyclic GFR-binding peptide
  MOD_RES (14), (15): Xaa is C or S
VKAVKVSRLQTPAXXPKPVT

SEQ ID NO: 3794 - protein, 9 aa, Artificial Sequence
  Non-cyclic GFR-binding peptide
MIQITINSL

SEQ ID NO: 3795 - protein, 18 aa, Artificial Sequence
  Non-cyclic GFR-binding peptide
  MOD_RES (14), (15): Xaa is C or S
VKAIKVSRLDQPVXXPSA

SEQ ID NO: 3796 - protein, 12 aa, Artificial Sequence
  Non-cyclic GFR-binding peptide
IKRIQVPRLDQP

SEQ ID NO: 3797 - protein, 11 aa, Artificial Sequence
  Non-cyclic GFR-binding peptide
IKRVQVPRLKT

SEQ ID NO: 3798 - protein, 16 aa, Artificial Sequence
  Non-cyclic GFR-binding peptide
  MOD_RES (14), (14): Xaa is C or S
YYLMTLPEEETPVXEL

SEQ ID NO: 3799 - protein, 20 aa, Artificial Sequence
  Non-cyclic GFR-binding peptide
  MOD_RES (14), (15): Xaa is C or S
IKRMQVPRLETPVXXAKPIK

SEQ ID NO: 3800 - protein, 18 aa, Artificial Sequence
  Non-cyclic GFR-binding peptide
  MOD_RES (14), (15): Xaa is C or S
MIQITINSLDQSVXXPSA

SEQ ID NO: 3801 - protein, 14 aa, Artificial Sequence
  Non-cyclic GFR-binding peptide
  MOD_RES (14), (14): Xaa is C or S
VKAVKVSRLQTPAX

SEQ ID NO: 3802 - protein, 15 aa, Artificial Sequence
  Non-cyclic GFR-binding peptide
  MOD_RES (14), (15): Xaa is C or S
MIQITINSLAQPVXX

SEQ ID NO: 3803 - protein, 14 aa, Artificial Sequence
  Non-cyclic GFR-binding peptide
  MOD_RES (14), (14): Xaa is C or S
IKRIQVPRLDQPVX

SEQ ID NO: 3804 - protein, 18 aa, Artificial Sequence
  Non-cyclic GFR-binding peptide
  MOD_RES (14), (15): Xaa is C or S
MIQVTINSLKTPAXXPKP

SEQ ID NO: 3805 - protein, 15 aa, Artificial Sequence
  Non-cyclic GFR-binding peptide
YYVVPLPELQVQTPR

SEQ ID NO: 3806 - protein, 12 aa, Artificial Sequence
  Non-cyclic GFR-binding peptide
MIQITINSLAQP

SEQ ID NO: 3807 - protein, 18 aa, Artificial Sequence
  Non-cyclic GFR-binding peptide
  MOD_RES (14), (15): Xaa is C or S
VKAMKVSRLETPVXXAKP

SEQ ID NO: 3808 - protein, 19 aa, Artificial Sequence
  Non-cyclic GFR-binding peptide
  MOD_RES (14), (15): Xaa is C or S
VKAIKVSRLAQPVXXPAAS

SEQ ID NO: 3809 - protein, 16 aa, Artificial Sequence
  Non-cyclic GFR-binding peptide
  MOD_RES (16), (16): Xaa is C or S
YYLVTLPELQVQTPRX

SEQ ID NO: 3810 - protein, 14 aa, Artificial Sequence
  Non-cyclic GFR-binding peptide
  MOD_RES (14), (14): Xaa is C or S
MIQITINSLDQSVX

SEQ ID NO: 3811 - protein, 15 aa, Artificial Sequence
  Non-cyclic GFR-binding peptide
  MOD_RES (14), (14): Xaa is C or S
YYVMPLPEEETPVXE

SEQ ID NO: 3812 - protein, 17 aa, Artificial Sequence
  Non-cyclic GFR-binding peptide
  MOD_RES (14), (15): Xaa is C or S
IKRMQVPRLETPVXXAK

SEQ ID NO: 3813 - protein, 18 aa, Artificial Sequence
  Non-cyclic GFR-binding peptide
  MOD_RES (14), (15): Xaa is C or S
IKRVQVPRLQTPAXXPKP

SEQ ID NO: 3814 - protein, 17 aa, Artificial Sequence
  Non-cyclic GFR-binding peptide
  MOD_RES (16), (16): Xaa is C or S
YYLVTLPEHHVRSPQXK

SEQ ID NO: 3815 - protein, 15 aa, Artificial Sequence
  Non-cyclic GFR-binding peptide
  MOD_RES (14), (15): Xaa is C or S
IKRVQVPRLQTPAXX

SEQ ID NO: 3816 - protein, 10 aa, Artificial Sequence
  Non-cyclic GFR-binding peptide
YYLMTLPEEE

SEQ ID NO: 3817 - protein, 9 aa, Artificial Sequence
  Non-cyclic GFR-binding peptide
YYLVTLPEH

SEQ ID NO: 3818 - protein, 13 aa, Artificial Sequence
  Non-cyclic GFR-binding peptide
VKAMKVSRLETPV

SEQ ID NO: 3819 - protein, 17 aa, Artificial Sequence
  Non-cyclic GFR-binding peptide
  MOD_RES (14), (15): Xaa is C or S
MIQVTINSLKTPAXXPK

SEQ ID NO: 3820 - protein, 10 aa, Artificial Sequence
  Non-cyclic GFR-binding peptide
MIQITINSLD

SEQ ID NO: 3821 - protein, 19 aa, Artificial Sequence
  Non-cyclic GFR-binding peptide
  MOD_RES (16), (16): Xaa is C or S
YYLVTLPEHHVRSPQXKVS

SEQ ID NO: 3822 - protein, 20 aa, Artificial Sequence
  Non-cyclic GFR-binding peptide
  MOD_RES (14), (15): Xaa is C or S
VKAMKVSRLETPVXXAKPIS

SEQ ID NO: 3823 - protein, 16 aa, Artificial Sequence
  Non-cyclic GFR-binding peptide
  MOD_RES (14), (15): Xaa is C or S
MIQVTINSLQTPAXXP

SEQ ID NO: 3824 - protein, 20 aa, Artificial Sequence
  Non-cyclic GFR-binding peptide
  MOD_RES (14), (14): Xaa is C or S
MIQVTINSLKTPAXTPKTVH

SEQ ID NO: 3825 - protein, 19 aa, Artificial Sequence
  Non-cyclic GFR-binding peptide
  MOD_RES (16), (16): Xaa is C or S
YYLVTLPELQVQTPRXQVN

SEQ ID NO: 3826 - protein, 14 aa, Artificial Sequence
  Non-cyclic GFR-binding peptide
  MOD_RES (14), (14): Xaa is C or S
IKRVQVPRLKTPAX

SEQ ID NO: 3827 - protein, 11 aa, Artificial Sequence
  Non-cyclic GFR-binding peptide
QDLSNITIQIM

SEQ ID NO: 3828 - protein, 15 aa, Artificial Sequence
  Non-cyclic GFR-binding peptide
  MOD_RES (1), (2): Xaa is C or S
XXVSQDLRSVKIAKV

SEQ ID NO: 3829 - protein, 10 aa, Artificial Sequence
  Non-cyclic GFR-binding peptide
KLSNITVQIM

SEQ ID NO: 3830 - protein, 15 aa, Artificial Sequence
  Non-cyclic GFR-binding peptide
  MOD_RES (2), (2): Xaa is C or S
TXAPTKLRSVKVAKV

SEQ ID NO: 3831 - protein, 20 aa, Artificial Sequence
  Non-cyclic GFR-binding peptide
  MOD_RES (6), (7): Xaa is C or S
YVPKPXXAPTKLRSVKVAKV

SEQ ID NO: 3832 - protein, 12 aa, Artificial Sequence
  Non-cyclic GFR-binding peptide
PTELRSVKMAKV

SEQ ID NO: 3833 - protein, 9 aa, Artificial Sequence
  Non-cyclic GFR-binding peptide
LRSVKMAKV

SEQ ID NO: 3834 - protein, 19 aa, Artificial Sequence
  Non-cyclic GFR-binding peptide
  MOD_RES (6), (6): Xaa is C or S
VTKPTXAPTKLRPVQVRKI

SEQ ID NO: 3835 - protein, 20 aa, Artificial Sequence
  Non-cyclic GFR-binding peptide
  MOD_RES (6), (7): Xaa is C or S
ASAAPXXVPQALSNITIQIM

SEQ ID NO: 3836 - protein, 19 aa, Artificial Sequence
  Non-cyclic GFR-binding peptide
  MOD_RES (5), (6): Xaa is C or S
VPKPXXAPTQLRSVKVAKV

SEQ ID NO: 3837 - protein, 11 aa, Artificial Sequence
  Non-cyclic GFR-binding peptide
TELSNITMQIM

SEQ ID NO: 3838 - protein, 16 aa, Artificial Sequence
  Non-cyclic GFR-binding peptide
  MOD_RES (2), (3): Xaa is C or S
PXXVSQDLRSVKIAKV

SEQ ID NO: 3839 - protein, 9 aa, Artificial Sequence
  Non-cyclic GFR-binding peptide
LRPVQIRKI

SEQ ID NO: 3840 - protein, 20 aa, Artificial Sequence
  Non-cyclic GFR-binding peptide
  MOD_RES (7), (7): Xaa is C or S
HVTKPTXAPTKLRSVKVAKV

SEQ ID NO: 3841 - protein, 12 aa, Artificial Sequence
  Non-cyclic GFR-binding peptide
PTKLRSVKVAKV

SEQ ID NO: 3842 - protein, 13 aa, Artificial Sequence
  Non-cyclic GFR-binding peptide
APTKLRSVKVAKV

SEQ ID NO: 3843 - protein, 11 aa, Artificial Sequence
  Non-cyclic GFR-binding peptide
VQLEPLTVLYY

SEQ ID NO: 3844 - protein, 17 aa, Artificial Sequence
  Non-cyclic GFR-binding peptide
  MOD_RES (3), (4): Xaa is C or S
APXXVPQALRPVQIRKI

SEQ ID NO: 3845 - protein, 15 aa, Artificial Sequence
  Non-cyclic GFR-binding peptide
RPTQVQLEPLTVLYY

SEQ ID NO: 3846 - protein, 18 aa, Artificial Sequence
  Non-cyclic GFR-binding peptide
  MOD_RES (4), (5): Xaa is C or S
PKPXXAPTQLSNITVQIM

SEQ ID NO: 3847 - protein, 14 aa, Artificial Sequence
  Non-cyclic GFR-binding peptide
  MOD_RES (1), (1): Xaa is C or S
XVPTELSNITMQIM

SEQ ID NO: 3848 - protein, 13 aa, Artificial Sequence
  Non-cyclic GFR-binding peptide
VSQDLRSVKIAKV

SEQ ID NO: 3849 - protein, 14 aa, Artificial Sequence
  Non-cyclic GFR-binding peptide
  MOD_RES (1), (1): Xaa is C or S
XVPQDLSNITIQIM

SEQ ID NO: 3850 - protein, 18 aa, Artificial Sequence
  Non-cyclic GFR-binding peptide
  MOD_RES (5), (5): Xaa is C or S
TKPTXAPTKLRPVQVRKI

SEQ ID NO: 3851 - protein, 14 aa, Artificial Sequence
  Non-cyclic GFR-binding peptide
  MOD_RES (1), (1): Xaa is C or S
XVPTEEEPLTMLYY

SEQ ID NO: 3852 - protein, 14 aa, Artificial Sequence
  Non-cyclic GFR-binding peptide
  MOD_RES (1), (1): Xaa is C or S
XVPTELRPVQMRKI

SEQ ID NO: 3853 - protein, 17 aa, Artificial Sequence
  Non-cyclic GFR-binding peptide
  MOD_RES (3), (4): Xaa is C or S
KPXXAPTQLRPVQVRKI

SEQ ID NO: 3854 - protein, 17 aa, Artificial Sequence
  Non-cyclic GFR-binding peptide
  MOD_RES (3), (4): Xaa is C or S
KPXXAPTKLRPVQVRKI

SEQ ID NO: 3855 - protein, 17 aa, Artificial Sequence
  Non-cyclic GFR-binding peptide
  MOD_RES (2), (2): Xaa is C or S
KXQPSRVHHEPLPVVYY

SEQ ID NO: 3856 - protein, 20 aa, Artificial Sequence
  Non-cyclic GFR-binding peptide
  MOD_RES (6), (7): Xaa is C or S
ASASPXXVPQDLRPVQIRKI

SEQ ID NO: 3857 - protein, 11 aa, Artificial Sequence
  Non-cyclic GFR-binding peptide
TQLRPVQVRKI

SEQ ID NO: 3858 - protein, 17 aa, Artificial Sequence
  Non-cyclic GFR-binding peptide
  MOD_RES (3), (4): Xaa is C or S
APXXVPQALSNITIQIM

SEQ ID NO: 3859 - protein, 16 aa, Artificial Sequence
  Non-cyclic GFR-binding peptide
  MOD_RES (2), (3): Xaa is C or S
PXXVPQALRSVKIAKV

SEQ ID NO: 3860 - protein, 18 aa, Artificial Sequence
  Non-cyclic GFR-binding peptide
  MOD_RES (4), (5): Xaa is C or S
PKAXXVPTELSNITMQIM

SEQ ID NO: 3861 - protein, 17 aa, Artificial Sequence
  Non-cyclic GFR-binding peptide
  MOD_RES (3), (4): Xaa is C or S
KAXXVPTELSNITMQIM

SEQ ID NO: 3862 - protein, 12 aa, Artificial Sequence
  Non-cyclic GFR-binding peptide
PTQLSNITVQIM

SEQ ID NO: 3863 - protein, 17 aa, Artificial Sequence
  Non-cyclic GFR-binding peptide
  MOD_RES (3), (4): Xaa is C or S
SPXXVSQDLRSVKIAKV

SEQ ID NO: 3864 - protein, 13 aa, Artificial Sequence
  Non-cyclic GFR-binding peptide
VPTELRPVQMRKI

SEQ ID NO: 3865 - protein, 20 aa, Artificial Sequence
  Non-cyclic GFR-binding peptide
  MOD_RES (6), (7): Xaa is C or S
ASAAPXXVPQALRPVQIRKI

SEQ ID NO: 3866 - protein, 15 aa, Artificial Sequence
  Non-cyclic GFR-binding peptide
  MOD_RES (1), (2): Xaa is C or S
XXAPTKLRSVKVAKV

SEQ ID NO: 3867 - protein, 10 aa, Artificial Sequence
  Non-cyclic GFR-binding peptide
ELSNITMQIM

SEQ ID NO: 3868 - protein, 19 aa, Artificial Sequence
  Non-cyclic GFR-binding peptide
  MOD_RES (5), (6): Xaa is C or S
SASPXXVSQDLRSVKIAKV

SEQ ID NO: 3869 - protein, 14 aa, Artificial Sequence
  Non-cyclic GFR-binding peptide
  MOD_RES (1), (1): Xaa is C or S
XVPTEEEPLPMVYY

SEQ ID NO: 3870 - protein, 19 aa, Artificial Sequence
  Non-cyclic GFR-binding peptide
  MOD_RES (5), (6): Xaa is C or S
IPKAXXVPTELRSVKMAKV

SEQ ID NO: 3871 - protein, 20 aa, Artificial Sequence
  Non-cyclic GFR-binding peptide
  MOD_RES (7), (7): Xaa is C or S
NDEGLEXVPTEEEPLTMLYY

SEQ ID NO: 3872 - protein, 14 aa, Artificial Sequence
  Non-cyclic GFR-binding peptide
  MOD_RES (1), (1): Xaa is C or S
XVPQALRSVKIAKV

SEQ ID NO: 3873 - protein, 15 aa, Artificial Sequence
  Non-cyclic GFR-binding peptide
  MOD_RES (1), (2): Xaa is C or S
XXVPTELRPVQMRKI

SEQ ID NO: 3874 - protein, 14 aa, Artificial Sequence
  Non-cyclic GFR-binding peptide
  MOD_RES (1), (1): Xaa is C or S
XVSQDLRPVQIRKI

SEQ ID NO: 3875 - protein, 15 aa, Artificial Sequence
  Non-cyclic GFR-binding peptide
  MOD_RES (2), (2): Xaa is C or S
EXVPTEEEPLTMLYY

SEQ ID NO: 3876 - protein, 16 aa, Artificial Sequence
  Non-cyclic GFR-binding peptide
  MOD_RES (2), (3): Xaa is C or S
AXXVPTELRSVKMAKV

SEQ ID NO: 3877 - protein, 14 aa, Artificial Sequence
  Non-cyclic GFR-binding peptide
  MOD_RES (1), (1): Xaa is C or S
XAPTKLSNITVQIM

SEQ ID NO: 3878 - protein, 13 aa, Artificial Sequence
  Non-cyclic GFR-binding peptide
APTQLRSVKVAKV

SEQ ID NO: 3879 - protein, 15 aa, Artificial Sequence
  Non-cyclic GFR-binding peptide
  MOD_RES (1), (2): Xaa is C or S
XXAPTQLRSVKVAKV

SEQ ID NO: 3880 - protein, 16 aa, Artificial Sequence
  Non-cyclic GFR-binding peptide
  MOD_RES (1), (1): Xaa is C or S
XRPTQVQLEPLPVVYY

SEQ ID NO: 3881 - protein, 17 aa, Artificial Sequence
  Non-cyclic GFR-binding peptide
  MOD_RES (3), (4): Xaa is C or S
SPXXVPQDLSNITIQIM

SEQ ID NO: 3882 - protein, 10 aa, Artificial Sequence
  Non-cyclic GFR-binding peptide
DLRPVQIRKI

SEQ ID NO: 3883 - protein, 12 aa, Artificial Sequence
  Non-cyclic GFR-binding peptide
QVQLEPLTVLYY

SEQ ID NO: 3884 - protein, 11 aa, Artificial Sequence
  Non-cyclic GFR-binding peptide
TKLSNITVQIM

SEQ ID NO: 3885 - protein, 13 aa, Artificial Sequence
  Non-cyclic GFR-binding peptide
VPQDLRPVQIRKI

SEQ ID NO: 3886 - protein, 12 aa, Artificial Sequence
  Non-cyclic GFR-binding peptide
PQDLRSVKIAKV

SEQ ID NO: 3887 - protein, 15 aa, Artificial Sequence
  Non-cyclic GFR-binding peptide
  MOD_RES (1), (2): Xaa is C or S
XXVPQDLRPVQIRKI

SEQ ID NO: 3888 - protein, 15 aa, Artificial Sequence
  Non-cyclic GFR-binding peptide
  MOD_RES (1), (2): Xaa is C or S
XXVPTELSNITMQIM

SEQ ID NO: 3889 - protein, 20 aa, Artificial Sequence
  Non-cyclic GFR-binding peptide
  MOD_RES (6), (7): Xaa is C or S
KIPKAXXVPTELRSVKMAKV

SEQ ID NO: 3890 - protein, 13 aa, Artificial Sequence
  Non-cyclic GFR-binding peptide
VPTEEEPLTMLYY

SEQ ID NO: 3891 - protein, 12 aa, Artificial Sequence
  Non-cyclic GFR-binding peptide
SQDLRSVKIAKV

SEQ ID NO: 3892 - protein, 16 aa, Artificial Sequence
  Non-cyclic GFR-binding peptide
  MOD_RES (2), (3): Xaa is C or S
PXXVPQDLRSVKIAKV

SEQ ID NO: 3893 - protein, 19 aa, Artificial Sequence
  Non-cyclic GFR-binding peptide
  MOD_RES (6), (6): Xaa is C or S
DEGLEXVPTEEEPLTMLYY

SEQ ID NO: 3894 - protein, 17 aa, Artificial Sequence
  Non-cyclic GFR-binding peptide
  MOD_RES (3), (4): Xaa is C or S
KPXXAPTQLRSVKVAKV

SEQ ID NO: 3895 - protein, 14 aa, Artificial Sequence
  Non-cyclic GFR-binding peptide
PTQVQLEPLPVVYY

SEQ ID NO: 3896 - protein, 15 aa, Artificial Sequence
  Non-cyclic GFR-binding peptide
  MOD_RES (1), (2): Xaa is C or S
XXVPQDLRSVKIAKV

SEQ ID NO: 3897 - protein, 19 aa, Artificial Sequence
  Non-cyclic GFR-binding peptide
  MOD_RES (5), (6): Xaa is C or S
IPKAXXVPTELRPVQMRKI

SEQ ID NO: 3898 - protein, 18 aa, Artificial Sequence
  Non-cyclic GFR-binding peptide
  MOD_RES (3), (3): Xaa is C or S
VKXQPSRVHHEPLPVVYY

SEQ ID NO: 3899 - protein, 16 aa, Artificial Sequence
  Non-cyclic GFR-binding peptide
  MOD_RES (1), (1): Xaa is C or S
XQPSRVHHEPLPVVYY

SEQ ID NO: 3900 - protein, 19 aa, Artificial Sequence
  Non-cyclic GFR-binding peptide
  MOD_RES (5), (6): Xaa is C or S
SASPXXVSQDLSNITIQIM

SEQ ID NO: 3901 - protein, 12 aa, Artificial Sequence
  Non-cyclic GFR-binding peptide
RVHHEPLTVLYY

SEQ ID NO: 3902 - protein, 17 aa, Artificial Sequence
  Non-cyclic GFR-binding peptide
  MOD_RES (3), (4): Xaa is C or S
SPXXVSQDLRPVQIRKI

SEQ ID NO: 3903 - protein, 18 aa, Artificial Sequence
  Non-cyclic GFR-binding peptide
  MOD_RES (5), (5): Xaa is C or S
TKPTXAPTKLRSVKVAKV

SEQ ID NO: 3904 - protein, 10 aa, Artificial Sequence
  Non-cyclic GFR-binding peptide
KLRPVQVRKI

SEQ ID NO: 3905 - protein, 19 aa, Artificial Sequence
  Non-cyclic GFR-binding peptide
  MOD_RES (5), (6): Xaa is C or S
SASPXXVPQDLRPVQIRKI

SEQ ID NO: 3906 - protein, 11 aa, Artificial Sequence
  Non-cyclic GFR-binding peptide
VHHEPLPVVYY

SEQ ID NO: 3907 - protein, 16 aa, Artificial Sequence
  Non-cyclic GFR-binding peptide
  MOD_RES (3), (3): Xaa is C or S
PTXAPTKLRSVKVAKV

SEQ ID NO: 3908 - protein, 11 aa, Artificial Sequence
  Non-cyclic GFR-binding peptide
QDLRPVQIRKI

SEQ ID NO: 3909 - protein, 11 aa, Artificial Sequence
  Non-cyclic GFR-binding peptide
TEEEPLPMVYY

SEQ ID NO: 3910 - protein, 10 aa, Artificial Sequence
  Non-cyclic GFR-binding peptide
HHEPLTVLYY

SEQ ID NO: 3911 - protein, 11 aa, Artificial Sequence
  Non-cyclic GFR-binding peptide
TQLSNITVQIM

SEQ ID NO: 3912 - protein, 17 aa, Artificial Sequence
  Non-cyclic GFR-binding peptide
  MOD_RES (4), (4): Xaa is C or S
GLEXVPTEEEPLTMLYY

SEQ ID NO: 3913 - protein, 18 aa, Artificial Sequence
  Non-cyclic GFR-binding peptide
  MOD_RES (5), (5): Xaa is C or S
EGLEXVPTEEEPLTMLYY

SEQ ID NO: 3914 - protein, 18 aa, Artificial Sequence
  Non-cyclic GFR-binding peptide
  MOD_RES (4), (5): Xaa is C or S
PKPXXAPTKLRSVKVAKV

SEQ ID NO: 3915 - protein, 15 aa, Artificial Sequence
  Non-cyclic GFR-binding peptide
QPSRVHHEPLTVLYY

SEQ ID NO: 3916 - protein, 16 aa, Artificial Sequence
  Non-cyclic GFR-binding peptide
  MOD_RES (2), (3): Xaa is C or S
PXXAPTKLRPVQVRKI

SEQ ID NO: 3917 - protein, 13 aa, Artificial Sequence
  Non-cyclic GFR-binding peptide
VPQDLRSVKIAKV

SEQ ID NO: 3918 - protein, 10 aa, Artificial Sequence
  Non-cyclic GFR-binding peptide
DLRSVKIAKV

SEQ ID NO: 3919 - protein, 11 aa, Artificial Sequence
  Non-cyclic GFR-binding peptide
QALRSVKIAKV

SEQ ID NO: 3920 - protein, 20 aa, Artificial Sequence
  Non-cyclic GFR-binding peptide
  MOD_RES (6), (7): Xaa is C or S
TVPKPXXAPTQLSNITVQIM

SEQ ID NO: 3921 - protein, 12 aa, Artificial Sequence
  Non-cyclic GFR-binding peptide
PTELRPVQMRKI

SEQ ID NO: 3922 - protein, 20 aa, Artificial Sequence
  Non-cyclic GFR-binding peptide
  MOD_RES (7), (7): Xaa is C or S
NDEGLEXVPTEEEPLPMVYY

SEQ ID NO: 3923 - protein, 16 aa, Artificial Sequence
  Non-cyclic GFR-binding peptide
  MOD_RES (2), (3): Xaa is C or S
PXXAPTKLRSVKVAKV

SEQ ID NO: 3924 - protein, 18 aa, Artificial Sequence
  Non-cyclic GFR-binding peptide
  MOD_RES (5), (5): Xaa is C or S
EGLEXVPTEEEPLPMVYY

SEQ ID NO: 3925 - protein, 17 aa, Artificial Sequence
  Non-cyclic GFR-binding peptide
  MOD_RES (3), (4): Xaa is C or S
SPXXVSQDLSNITIQIM

SEQ ID NO: 3926 - protein, 12 aa, Artificial Sequence
  Non-cyclic GFR-binding peptide
RVHHEPLPVVYY

SEQ ID NO: 3927 - protein, 16 aa, Artificial Sequence
  Non-cyclic GFR-binding peptide
  MOD_RES (3), (3): Xaa is C or S
PTXAPTKLRPVQVRKI

SEQ ID NO: 3928 - protein, 14 aa, Artificial Sequence
  Non-cyclic GFR-binding peptide
PSRVHHEPLTVLYY

SEQ ID NO: 3929 - protein, 15 aa, Artificial Sequence
  Non-cyclic GFR-binding peptide
QPSRVHHEPLPVVYY

SEQ ID NO: 3930 - protein, 16 aa, Artificial Sequence
  Non-cyclic GFR-binding peptide
  MOD_RES (2), (3): Xaa is C or S
PXXAPTQLRSVKVAKV

SEQ ID NO: 3931 - protein, 15 aa, Artificial Sequence
  Non-cyclic GFR-binding peptide
  MOD_RES (1), (2): Xaa is C or S
XXVPQALRSVKIAKV

SEQ ID NO: 3932 - protein, 13 aa, Artificial Sequence
  Non-cyclic GFR-binding peptide
VPTELSNITMQIM

SEQ ID NO: 3933 - protein, 10 aa, Artificial Sequence
  Non-cyclic GFR-binding peptide
ALRSVKIAKV

SEQ ID NO: 3934 - protein, 15 aa, Artificial Sequence
  Non-cyclic GFR-binding peptide
  MOD_RES (1), (2): Xaa is C or S
XXVSQDLRPVQIRKI

SEQ ID NO: 3935 - protein, 18 aa, Artificial Sequence
  Non-cyclic GFR-binding peptide
  MOD_RES (3), (3): Xaa is C or S
VKXQPSRVHHEPLTVLYY

SEQ ID NO: 3936 - protein, 12 aa, Artificial Sequence
  Non-cyclic GFR-binding peptide
PTKLSNITVQIM

SEQ ID NO: 3937 - protein, 20 aa, Artificial Sequence
  Non-cyclic GFR-binding peptide
  MOD_RES (5), (5): Xaa is C or S
SSVKXQPSRVHHEPLPVVYY

SEQ ID NO: 3938 - protein, 20 aa, Artificial Sequence
  Non-cyclic GFR-binding peptide
  MOD_RES (6), (7): Xaa is C or S
YVPKPXXAPTKLRPVQVRKI

SEQ ID NO: 3939 - protein, 16 aa, Artificial Sequence
  Non-cyclic GFR-binding peptide
  MOD_RES (2), (3): Xaa is C or S
PXXVPQDLRPVQIRKI

SEQ ID NO: 3940 - protein, 12 aa, Artificial Sequence
  Non-cyclic GFR-binding peptide
QVQLEPLPVVYY

SEQ ID NO: 3941 - protein, 11 aa, Artificial Sequence
  Non-cyclic GFR-binding peptide
TEEEPLTMLYY

SEQ ID NO: 3942 - protein, 12 aa, Artificial Sequence
  Non-cyclic GFR-binding peptide
PTQLRPVQVRKI

SEQ ID NO: 3943 - protein, 11 aa, Artificial Sequence
  Non-cyclic GFR-binding peptide
QALRPVQIRKI

SEQ ID NO: 3944 - protein, 14 aa, Artificial Sequence
  Non-cyclic GFR-binding peptide
  MOD_RES (1), (1): Xaa is C or S
XVSQDLRSVKIAKV

SEQ ID NO: 3945 - protein, 20 aa, Artificial Sequence
  Non-cyclic GFR-binding peptide
  MOD_RES (6), (7): Xaa is C or S
ASASPXXVPQDLSNITIQIM

SEQ ID NO: 3946 - protein, 19 aa, Artificial Sequence
  Non-cyclic GFR-binding peptide
  MOD_RES (5), (6): Xaa is C or S
SAAPXXVPQALSNITIQIM

SEQ ID NO: 3947 - protein, 13 aa, Artificial Sequence
  Non-cyclic GFR-binding peptide
VSQDLRPVQIRKI

SEQ ID NO: 3948 - protein, 17 aa, Artificial Sequence
  Non-cyclic GFR-binding peptide
  MOD_RES (3), (4): Xaa is C or S
SPXXVPQDLRPVQIRKI

SEQ ID NO: 3949 - protein, 19 aa, Artificial Sequence
  Non-cyclic GFR-binding peptide
  MOD_RES (6), (6): Xaa is C or S
DEGLEXVPTEEEPLPMVYY

SEQ ID NO: 3950 - protein, 18 aa, Artificial Sequence
  Non-cyclic GFR-binding peptide
  MOD_RES (4), (5): Xaa is C or S
AAPXXVPQALRSVKIAKV

SEQ ID NO: 3951 - protein, 13 aa, Artificial Sequence
  Non-cyclic GFR-binding peptide
VPTEEEPLPMVYY

SEQ ID NO: 3952 - protein, 13 aa, Artificial Sequence
  Non-cyclic GFR-binding peptide
VPQALRSVKIAKV

SEQ ID NO: 3953 - protein, 13 aa, Artificial Sequence
  Non-cyclic GFR-binding peptide
SRVHHEPLPVVYY

SEQ ID NO: 3954 - protein, 10 aa, Artificial Sequence
  Non-cyclic GFR-binding peptide
ELRPVQMRKI

SEQ ID NO: 3955 - protein, 16 aa, Artificial Sequence
  Non-cyclic GFR-binding peptide
  MOD_RES (1), (1): Xaa is C or S
XQPSRVHHEPLTVLYY

SEQ ID NO: 3956 - protein, 9 aa, Artificial Sequence
  Non-cyclic GFR-binding peptide
EEPLPMVYY

SEQ ID NO: 3957 - protein, 19 aa, Artificial Sequence
  Non-cyclic GFR-binding peptide
  MOD_RES (5), (6): Xaa is C or S
SASPXXVPQDLRSVKIAKV

SEQ ID NO: 3958 - protein, 17 aa, Artificial Sequence
  Non-cyclic GFR-binding peptide
  MOD_RES (4), (4): Xaa is C or S
GLEXVPTEEEPLPMVYY

SEQ ID NO: 3959 - protein, 10 aa, Artificial Sequence
  Non-cyclic GFR-binding peptide
ALRPVQIRKI

SEQ ID NO: 3960 - protein, 16 aa, Artificial Sequence
  Non-cyclic GFR-binding peptide
  MOD_RES (2), (3): Xaa is C or S
PXXVPQALRPVQIRKI

SEQ ID NO: 3961 - protein, 20 aa, Artificial Sequence
  Non-cyclic GFR-binding peptide
  MOD_RES (6), (7): Xaa is C or S
SIPKAXXVPTELSNITMQIM

SEQ ID NO: 3962 - protein, 12 aa, Artificial Sequence
  Non-cyclic GFR-binding peptide
PTELSNITMQIM

SEQ ID NO: 3963 - protein, 20 aa, Artificial Sequence
  Non-cyclic GFR-binding peptide
  MOD_RES (6), (7): Xaa is C or S
ASASPXXVPQDLRSVKIAKV

SEQ ID NO: 3964 - protein, 17 aa, Artificial Sequence
  Non-cyclic GFR-binding peptide
  MOD_RES (3), (4): Xaa is C or S
KPXXAPTKLRSVKVAKV

SEQ ID NO: 3965 - protein, 19 aa, Artificial Sequence
  Non-cyclic GFR-binding peptide
  MOD_RES (5), (6): Xaa is C or S
SASPXXVSQDLRPVQIRKI

SEQ ID NO: 3966 - protein, 9 aa, Artificial Sequence
  Non-cyclic GFR-binding peptide
LSNITMQIM

SEQ ID NO: 3967 - protein, 15 aa, Artificial Sequence
  Non-cyclic GFR-binding peptide
  MOD_RES (2), (2): Xaa is C or S
TXAPTKLSNITVQIM

SEQ ID NO: 3968 - protein, 20 aa, Artificial Sequence
  Non-cyclic GFR-binding peptide
  MOD_RES (6), (7): Xaa is C or S
ASAAPXXVPQALRSVKIAKV

SEQ ID NO: 3969 - protein, 13 aa, Artificial Sequence
  Non-cyclic GFR-binding peptide
APTQLRPVQVRKI

SEQ ID NO: 3970 - protein, 13 aa, Artificial Sequence
  Non-cyclic GFR-binding peptide
APTKLSNITVQIM

SEQ ID NO: 3971 - protein, 15 aa, Artificial Sequence
  Non-cyclic GFR-binding peptide
  MOD_RES (1), (2): Xaa is C or S
XXVPQALRPVQIRKI

SEQ ID NO: 3972 - protein, 14 aa, Artificial Sequence
  Non-cyclic GFR-binding peptide
  MOD_RES (1), (1): Xaa is C or S
XVPTELRSVKMAKV

SEQ ID NO: 3973 - protein, 11 aa, Artificial Sequence
  Non-cyclic GFR-binding peptide
QDLRSVKIAKV

SEQ ID NO: 3974 - protein, 14 aa, Artificial Sequence
  Non-cyclic GFR-binding peptide
  MOD_RES (1), (1): Xaa is C or S
XVPQALSNITIQIM

SEQ ID NO: 3975 - protein, 20 aa, Artificial Sequence
  Non-cyclic GFR-binding peptide
  MOD_RES (6), (7): Xaa is C or S
YVPKPXXAPTKLSNITVQIM

SEQ ID NO: 3976 - protein, 18 aa, Artificial Sequence
  Non-cyclic GFR-binding peptide
  MOD_RES (4), (5): Xaa is C or S
ASPXXVPQDLRPVQIRKI

SEQ ID NO: 3977 - protein, 17 aa, Artificial Sequence
  Non-cyclic GFR-binding peptide
  MOD_RES (2), (2): Xaa is C or S
QXRPTQVQLEPLTVLYY

SEQ ID NO: 3978 - protein, 18 aa, Artificial Sequence
  Non-cyclic GFR-binding peptide
  MOD_RES (3), (3): Xaa is C or S
VQXRPTQVQLEPLTVLYY

SEQ ID NO: 3979 - protein, 16 aa, Artificial Sequence
  Non-cyclic GFR-binding peptide
  MOD_RES (2), (3): Xaa is C or S
PXXVSQDLSNITIQIM

SEQ ID NO: 3980 - protein, 11 aa, Artificial Sequence
  Non-cyclic GFR-binding peptide
TELRSVKMAKV

SEQ ID NO: 3981 - protein, 20 aa, Artificial Sequence
  Non-cyclic GFR-binding peptide
  MOD_RES (5), (5): Xaa is C or S
RNVQXRPTQVQLEPLTVLYY

SEQ ID NO: 3982 - protein, 18 aa, Artificial Sequence
  Non-cyclic GFR-binding peptide
  MOD_RES (4), (5): Xaa is C or S
AAPXXVPQALRPVQIRKI

SEQ ID NO: 3983 - protein, 14 aa, Artificial Sequence
  Non-cyclic GFR-binding peptide
  MOD_RES (1), (1): Xaa is C or S
XAPTQLSNITVQIM

SEQ ID NO: 3984 - protein, 19 aa, Artificial Sequence
  Non-cyclic GFR-binding peptide
  MOD_RES (5), (6): Xaa is C or S
SASPXXVPQDLSNITIQIM

SEQ ID NO: 3985 - protein, 17 aa, Artificial Sequence
  Non-cyclic GFR-binding peptide
  MOD_RES (3), (4): Xaa is C or S
APXXVPQALRSVKIAKV

SEQ ID NO: 3986 - protein, 13 aa, Artificial Sequence
  Non-cyclic GFR-binding peptide
SRVHHEPLTVLYY

SEQ ID NO: 3987 - protein, 16 aa, Artificial Sequence
  Non-cyclic GFR-binding peptide
  MOD_RES (2), (3): Xaa is C or S
AXXVPTELSNITMQIM

SEQ ID NO: 3988 - protein, 19 aa, Artificial Sequence
  Non-cyclic GFR-binding peptide
  MOD_RES (5), (6): Xaa is C or S
VPKPXXAPTQLSNITVQIM

SEQ ID NO: 3989 - protein, 17 aa, Artificial Sequence
  Non-cyclic GFR-binding peptide
  MOD_RES (3), (4): Xaa is C or S
SPXXVPQDLRSVKIAKV

SEQ ID NO: 3990 - protein, 11 aa, Artificial Sequence
  Non-cyclic GFR-binding peptide
TKLRSVKVAKV

SEQ ID NO: 3991 - protein, 17 aa, Artificial Sequence
  Non-cyclic GFR-binding peptide
  MOD_RES (3), (4): Xaa is C or S
KAXXVPTELRSVKMAKV

SEQ ID NO: 3992 - protein, 20 aa, Artificial Sequence
  Non-cyclic GFR-binding peptide
  MOD_RES (6), (7): Xaa is C or S
TVPKPXXAPTQLRPVQVRKI

SEQ ID NO: 3993 - protein, 12 aa, Artificial Sequence
  Non-cyclic GFR-binding peptide
PTEEEPLTMLYY

SEQ ID NO: 3994 - protein, 12 aa, Artificial Sequence
  Non-cyclic GFR-binding peptide
PQDLSNITIQIM

SEQ ID NO: 3995 - protein, 16 aa, Artificial Sequence
  Non-cyclic GFR-binding peptide
  MOD_RES (2), (3): Xaa is C or S
PXXAPTKLSNITVQIM

SEQ ID NO: 3996 - protein, 19 aa, Artificial Sequence
  Non-cyclic GFR-binding peptide
  MOD_RES (5), (6): Xaa is C or S
VPKPXXAPTQLRPVQVRKI

SEQ ID NO: 3997 - protein, 20 aa, Artificial Sequence
  Non-cyclic GFR-binding peptide
  MOD_RES (5), (5): Xaa is C or S
SSVKXQPSRVHHEPLTVLYY

SEQ ID NO: 3998 - protein, 11 aa, Artificial Sequence
  Non-cyclic GFR-binding peptide
QALSNITIQIM

SEQ ID NO: 3999 - protein, 15 aa, Artificial Sequence
  Non-cyclic GFR-binding peptide
  MOD_RES (1), (2): Xaa is C or S
XXAPTQLSNITVQIM

SEQ ID NO: 4000 - protein, 16 aa, Artificial Sequence
  Non-cyclic GFR-binding peptide
  MOD_RES (2), (3): Xaa is C or S
PXXVSQDLRPVQIRKI

SEQ ID NO: 4001 - protein, 12 aa, Artificial Sequence
  Non-cyclic GFR-binding peptide
PQALRSVKIAKV

SEQ ID NO: 4002 - protein, 18 aa, Artificial Sequence
  Non-cyclic GFR-binding peptide
  MOD_RES (4), (5): Xaa is C or S
AAPXXVPQALSNITIQIM

SEQ ID NO: 4003 - protein, 19 aa, Artificial Sequence
  Non-cyclic GFR-binding peptide
  MOD_RES (6), (6): Xaa is C or S
VTKPTXAPTKLRSVKVAKV

SEQ ID NO: 4004 - protein, 13 aa, Artificial Sequence
  Non-cyclic GFR-binding peptide
VSQDLSNITIQIM

SEQ ID NO: 4005 - protein, 18 aa, Artificial Sequence
  Non-cyclic GFR-binding peptide
  MOD_RES (3), (3): Xaa is C or S
VQXRPTQVQLEPLPVVYY

SEQ ID NO: 4006 - protein, 18 aa, Artificial Sequence
  Non-cyclic GFR-binding peptide
  MOD_RES (4), (5): Xaa is C or S
ASPXXVSQDLRSVKIAKV

SEQ ID NO: 4007 - protein, 12 aa, Artificial Sequence
  Non-cyclic GFR-binding peptide
SQDLRPVQIRKI

SEQ ID NO: 4008 - protein, 19 aa, Artificial Sequence
  Non-cyclic GFR-binding peptide
  MOD_RES (4), (4): Xaa is C or S
SVKXQPSRVHHEPLPVVYY

SEQ ID NO: 4009 - protein, 9 aa, Artificial Sequence
  Non-cyclic GFR-binding peptide
LRSVKIAKV

SEQ ID NO: 4010 - protein, 12 aa, Artificial Sequence
  Non-cyclic GFR-binding peptide
PTKLRPVQVRKI

SEQ ID NO: 4011 - protein, 14 aa, Artificial Sequence
  Non-cyclic GFR-binding peptide
  MOD_RES (1), (1): Xaa is C or S
XAPTKLRSVKVAKV

SEQ ID NO: 4012 - protein, 18 aa, Artificial Sequence
  Non-cyclic GFR-binding peptide
  MOD_RES (4), (5): Xaa is C or S
ASPXXVPQDLSNITIQIM

SEQ ID NO: 4013 - protein, 18 aa, Artificial Sequence
  Non-cyclic GFR-binding peptide
  MOD_RES (4), (5): Xaa is C or S
PKPXXAPTKLRPVQVRKI

SEQ ID NO: 4014 - protein, 16 aa, Artificial Sequence
  Non-cyclic GFR-binding peptide
  MOD_RES (3), (3): Xaa is C or S
PTXAPTKLSNITVQIM

SEQ ID NO: 4015 - protein, 9 aa, Artificial Sequence
  Non-cyclic GFR-binding peptide
LRPVQMRKI

SEQ ID NO: 4016 - protein, 12 aa, Artificial Sequence
  Non-cyclic GFR-binding peptide
PTEEEPLPMVYY

SEQ ID NO: 4017 - protein, 10 aa, Artificial Sequence
  Non-cyclic GFR-binding peptide
ELRSVKMAKV

SEQ ID NO: 4018 - protein, 9 aa, Artificial Sequence
  Non-cyclic GFR-binding peptide
EEPLTMLYY

SEQ ID NO: 4019 - protein, 12 aa, Artificial Sequence
  Non-cyclic GFR-binding peptide
PTQLRSVKVAKV

SEQ ID NO: 4020 - protein, 19 aa, Artificial Sequence
  Non-cyclic GFR-binding peptide
  MOD_RES (5), (6): Xaa is C or S
IPKAXXVPTELSNITMQIM

SEQ ID NO: 4021 - protein, 13 aa, Artificial Sequence
  Non-cyclic GFR-binding peptide
VPQALRPVQIRKI

SEQ ID NO: 4022 - protein, 11 aa, Artificial Sequence
  Non-cyclic GFR-binding peptide
VHHEPLTVLYY

SEQ ID NO: 4023 - protein, 10 aa, Artificial Sequence
  Non-cyclic GFR-binding peptide
KLRSVKVAKV

SEQ ID NO: 4024 - protein, 19 aa, Artificial Sequence
  Non-cyclic GFR-binding peptide
  MOD_RES (5), (6): Xaa is C or S
VPKPXXAPTKLSNITVQIM

SEQ ID NO: 4025 - protein, 16 aa, Artificial Sequence
  Non-cyclic GFR-binding peptide
  MOD_RES (2), (3): Xaa is C or S
PXXVPQALSNITIQIM

SEQ ID NO: 4026 - protein, 18 aa, Artificial Sequence
  Non-cyclic GFR-binding peptide
  MOD_RES (4), (5): Xaa is C or S
PKPXXAPTQLRSVKVAKV

SEQ ID NO: 4027 - protein, 16 aa, Artificial Sequence
  Non-cyclic GFR-binding peptide
  MOD_RES (2), (3): Xaa is C or S
PXXVPQDLSNITIQIM

SEQ ID NO: 4028 - protein, 14 aa, Artificial Sequence
  Non-cyclic GFR-binding peptide
PSRVHHEPLPVVYY

SEQ ID NO: 4029 - protein, 17 aa, Artificial Sequence
  Non-cyclic GFR-binding peptide
  MOD_RES (4), (4): Xaa is C or S
KPTXAPTKLSNITVQIM

SEQ ID NO: 4030 - protein, 20 aa, Artificial Sequence
  Non-cyclic GFR-binding peptide
  MOD_RES (6), (7): Xaa is C or S
ASASPXXVSQDLSNITIQIM

SEQ ID NO: 4031 - protein, 20 aa, Artificial Sequence
  Non-cyclic GFR-binding peptide
  MOD_RES (7), (7): Xaa is C or S
HVTKPTXAPTKLRPVQVRKI

SEQ ID NO: 4032 - protein, 16 aa, Artificial Sequence
  Non-cyclic GFR-binding peptide
  MOD_RES (2), (3): Xaa is C or S
PXXAPTQLRPVQVRKI

SEQ ID NO: 4033 - protein, 15 aa, Artificial Sequence
  Non-cyclic GFR-binding peptide
  MOD_RES (1), (2): Xaa is C or S
XXVSQDLSNITIQIM

SEQ ID NO: 4034 - protein, 16 aa, Artificial Sequence
  Non-cyclic GFR-binding peptide
  MOD_RES (3), (3): Xaa is C or S
LEXVPTEEEPLPMVYY

SEQ ID NO: 4035 - protein, 17 aa, Artificial Sequence
  Non-cyclic GFR-binding peptide
  MOD_RES (2), (2): Xaa is C or S
QXRPTQVQLEPLPVVYY

SEQ ID NO: 4036 - protein, 15 aa, Artificial Sequence
  Non-cyclic GFR-binding peptide
  MOD_RES (2), (2): Xaa is C or S
TXAPTKLRPVQVRKI

SEQ ID NO: 4037 - protein, 14 aa, Artificial Sequence
  Non-cyclic GFR-binding peptide
  MOD_RES (1), (1): Xaa is C or S
XVPQDLRSVKIAKV

SEQ ID NO: 4038 - protein, 13 aa, Artificial Sequence
  Non-cyclic GFR-binding peptide
VPQALSNITIQIM

SEQ ID NO: 4039 - protein, 10 aa, Artificial Sequence
  Non-cyclic GFR-binding peptide
EEEPLPMVYY

SEQ ID NO: 4040 - protein, 10 aa, Artificial Sequence
  Non-cyclic GFR-binding peptide
HHEPLPVVYY

SEQ ID NO: 4041 - protein, 14 aa, Artificial Sequence
  Non-cyclic GFR-binding peptide
  MOD_RES (1), (1): Xaa is C or S
XAPTQLRPVQVRKI

SEQ ID NO: 4042 - protein, 19 aa, Artificial Sequence
  Non-cyclic GFR-binding peptide
  MOD_RES (5), (6): Xaa is C or S
SAAPXXVPQALRPVQIRKI

SEQ ID NO: 4043 - protein, 18 aa, Artificial Sequence
  Non-cyclic GFR-binding peptide
  MOD_RES (5), (5): Xaa is C or S
TKPTXAPTKLSNITVQIM

SEQ ID NO: 4044 - protein, 11 aa, Artificial Sequence
  Non-cyclic GFR-binding peptide
TQLRSVKVAKV

SEQ ID NO: 4045 - protein, 15 aa, Artificial Sequence
  Non-cyclic GFR-binding peptide
  MOD_RES (1), (2): Xaa is C or S
XXVPQDLSNITIQIM

SEQ ID NO: 4046 - protein, 13 aa, Artificial Sequence
  Non-cyclic GFR-binding peptide
APTKLRPVQVRKI

SEQ ID NO: 4047 - protein, 11 aa, Artificial Sequence
  Non-cyclic GFR-binding peptide
TELRPVQMRKI

SEQ ID NO: 4048 - protein, 13 aa, Artificial Sequence
  Non-cyclic GFR-binding peptide
APTQLSNITVQIM

SEQ ID NO: 4049 - protein, 13 aa, Artificial Sequence
  Non-cyclic GFR-binding peptide
TQVQLEPLTVLYY

SEQ ID NO: 4050 - protein, 15 aa, Artificial Sequence
  Non-cyclic GFR-binding peptide
  MOD_RES (1), (2): Xaa is C or S
XXVPTELRSVKMAKV

SEQ ID NO: 4051 - protein, 9 aa, Artificial Sequence
  Non-cyclic GFR-binding peptide
HEPLPVVYY

SEQ ID NO: 4052 - protein, 20 aa, Artificial Sequence
  Non-cyclic GFR-binding peptide
  MOD_RES (6), (7): Xaa is C or S
SIPKAXXVPTELRPVQMRKI

SEQ ID NO: 4053 - protein, 17 aa, Artificial Sequence
  Non-cyclic GFR-binding peptide
  MOD_RES (4), (4): Xaa is C or S
KPTXAPTKLRPVQVRKI

SEQ ID NO: 4054 - protein, 12 aa, Artificial Sequence
  Non-cyclic GFR-binding peptide
SQDLSNITIQIM

SEQ ID NO: 4055 - protein, 16 aa, Artificial Sequence
  Non-cyclic GFR-binding peptide
  MOD_RES (2), (3): Xaa is C or S
AXXVPTELRPVQMRKI

SEQ ID NO: 4056 - protein, 14 aa, Artificial Sequence
  Non-cyclic GFR-binding peptide
PTQVQLEPLTVLYY

SEQ ID NO: 4057 - protein, 15 aa, Artificial Sequence
  Non-cyclic GFR-binding peptide
  MOD_RES (1), (2): Xaa is C or S
XXAPTKLRPVQVRKI

SEQ ID NO: 4058 - protein, 10 aa, Artificial Sequence
  Non-cyclic GFR-binding peptide
ALSNITIQIM

SEQ ID NO: 4059 - protein, 19 aa, Artificial Sequence
  Non-cyclic GFR-binding peptide
  MOD_RES (4), (4): Xaa is C or S
NVQXRPTQVQLEPLPVVYY

SEQ ID NO: 4060 - protein, 13 aa, Artificial Sequence
  Non-cyclic GFR-binding peptide
TQVQLEPLPVVYY

SEQ ID NO: 4061 - protein, 17 aa, Artificial Sequence
  Non-cyclic GFR-binding peptide
  MOD_RES (3), (4): Xaa is C or S
KPXXAPTQLSNITVQIM

SEQ ID NO: 4062 - protein, 19 aa, Artificial Sequence
  Non-cyclic GFR-binding peptide
  MOD_RES (6), (6): Xaa is C or S
VTKPTXAPTKLSNITVQIM

SEQ ID NO: 4063 - protein, 19 aa, Artificial Sequence
  Non-cyclic GFR-binding peptide
  MOD_RES (5), (6): Xaa is C or S
VPKPXXAPTKLRSVKVAKV

SEQ ID NO: 4064 - protein, 20 aa, Artificial Sequence
  Non-cyclic GFR-binding peptide
  MOD_RES (6), (7): Xaa is C or S
ASASPXXVSQDLRSVKIAKV

SEQ ID NO: 4065 - protein, 12 aa, Artificial Sequence
  Non-cyclic GFR-binding peptide
PQALRPVQIRKI

SEQ ID NO: 4066 - protein, 14 aa, Artificial Sequence
  Non-cyclic GFR-binding peptide
  MOD_RES (1), (1): Xaa is C or S
XVPQALRPVQIRKI

SEQ ID NO: 4067 - protein, 18 aa, Artificial Sequence
  Non-cyclic GFR-binding peptide
  MOD_RES (4), (5): Xaa is C or S
PKAXXVPTELRPVQMRKI

SEQ ID NO: 4068 - protein, 20 aa, Artificial Sequence
  Non-cyclic GFR-binding peptide
  MOD_RES (6), (7): Xaa is C or S
KIPKAXXVPTELSNITMQIM

SEQ ID NO: 4069 - protein, 18 aa, Artificial Sequence
  Non-cyclic GFR-binding peptide
  MOD_RES (4), (5): Xaa is C or S
ASPXXVSQDLRPVQIRKI

SEQ ID NO: 4070 - protein, 15 aa, Artificial Sequence
  Non-cyclic GFR-binding peptide
  MOD_RES (1), (2): Xaa is C or S
XXAPTKLSNITVQIM

SEQ ID NO: 4071 - protein, 20 aa, Artificial Sequence
  Non-cyclic GFR-binding peptide
  MOD_RES (6), (7): Xaa is C or S
ASASPXXVSQDLRPVQIRKI

SEQ ID NO: 4072 - protein, 13 aa, Artificial Sequence
  Non-cyclic GFR-binding peptide
VPQDLSNITIQIM

SEQ ID NO: 4073 - protein, 11 aa, Artificial Sequence
  Non-cyclic GFR-binding peptide
VQLEPLPVVYY

SEQ ID NO: 4074 - protein, 20 aa, Artificial Sequence
  Non-cyclic GFR-binding peptide
  MOD_RES (5), (5): Xaa is C or S
RNVQXRPTQVQLEPLPVVYY

SEQ ID NO: 4075 - protein, 19 aa, Artificial Sequence
  Non-cyclic GFR-binding peptide
  MOD_RES (5), (6): Xaa is C or S
VPKPXXAPTKLRPVQVRKI

SEQ ID NO: 4076 - protein, 17 aa, Artificial Sequence
  Non-cyclic GFR-binding peptide
  MOD_RES (4), (4): Xaa is C or S
KPTXAPTKLRSVKVAKV

SEQ ID NO: 4077 - protein, 20 aa, Artificial Sequence
  Non-cyclic GFR-binding peptide
  MOD_RES (6), (7): Xaa is C or S
TVPKPXXAPTQLRSVKVAKV

SEQ ID NO: 4078 - protein, 9 aa, Artificial Sequence
  Non-cyclic GFR-binding peptide
LSNITIQIM

SEQ ID NO: 4079 - protein, 18 aa, Artificial Sequence
  Non-cyclic GFR-binding peptide
  MOD_RES (4), (5): Xaa is C or S
ASPXXVPQDLRSVKIAKV

SEQ ID NO: 4080 - protein, 12 aa, Artificial Sequence
  Non-cyclic GFR-binding peptide
PQDLRPVQIRKI

SEQ ID NO: 4081 - protein, 11 aa, Artificial Sequence
  Non-cyclic GFR-binding peptide
TKLRPVQVRKI

SEQ ID NO: 4082 - protein, 16 aa, Artificial Sequence
  Non-cyclic GFR-binding peptide
  MOD_RES (3), (3): Xaa is C or S
LEXVPTEEEPLTMLYY

SEQ ID NO: 4083 - protein, 20 aa, Artificial Sequence
  Non-cyclic GFR-binding peptide
  MOD_RES (6), (7): Xaa is C or S
KIPKAXXVPTELRPVQMRKI

SEQ ID NO: 4084 - protein, 18 aa, Artificial Sequence
  Non-cyclic GFR-binding peptide
  MOD_RES (4), (5): Xaa is C or S
ASPXXVSQDLSNITIQIM

SEQ ID NO: 4085 - protein, 14 aa, Artificial Sequence
  Non-cyclic GFR-binding peptide
  MOD_RES (1), (1): Xaa is C or S
XAPTQLRSVKVAKV

SEQ ID NO: 4086 - protein, 15 aa, Artificial Sequence
  Non-cyclic GFR-binding peptide
  MOD_RES (1), (2): Xaa is C or S
XXVPQALSNITIQIM

SEQ ID NO: 4087 - protein, 14 aa, Artificial Sequence
  Non-cyclic GFR-binding peptide
  MOD_RES (1), (1): Xaa is C or S
XVPQDLRPVQIRKI

SEQ ID NO: 4088 - protein, 18 aa, Artificial Sequence
  Non-cyclic GFR-binding peptide
  MOD_RES (4), (5): Xaa is C or S
PKPXXAPTKLSNITVQIM

SEQ ID NO: 4089 - protein, 15 aa, Artificial Sequence
  Non-cyclic GFR-binding peptide
RPTQVQLEPLPVVYY

SEQ ID NO: 4090 - protein, 12 aa, Artificial Sequence
  Non-cyclic GFR-binding peptide
PQALSNITIQIM

SEQ ID NO: 4091 - protein, 18 aa, Artificial Sequence
  Non-cyclic GFR-binding peptide
  MOD_RES (4), (5): Xaa is C or S
PKAXXVPTELRSVKMAKV

SEQ ID NO: 4092 - protein, 19 aa, Artificial Sequence
  Non-cyclic GFR-binding peptide
  MOD_RES (5), (6): Xaa is C or S
SAAPXXVPQALRSVKIAKV

SEQ ID NO: 4093 - protein, 16 aa, Artificial Sequence
  Non-cyclic GFR-binding peptide
  MOD_RES (1), (1): Xaa is C or S
XRPTQVQLEPLTVLYY

SEQ ID NO: 4094 - protein, 14 aa, Artificial Sequence
  Non-cyclic GFR-binding peptide
  MOD_RES (1), (1): Xaa is C or S
XVSQDLSNITIQIM

SEQ ID NO: 4095 - protein, 15 aa, Artificial Sequence
  Non-cyclic GFR-binding peptide
  MOD_RES (2), (2): Xaa is C or S
EXVPTEEEPLPMVYY

SEQ ID NO: 4096 - protein, 17 aa, Artificial Sequence
  Non-cyclic GFR-binding peptide
  MOD_RES (3), (4): Xaa is C or S
KAXXVPTELRPVQMRKI

SEQ ID NO: 4097 - protein, 18 aa, Artificial Sequence
  Non-cyclic GFR-binding peptide
  MOD_RES (4), (5): Xaa is C or S
PKPXXAPTQLRPVQVRKI

SEQ ID NO: 4098 - protein, 17 aa, Artificial Sequence
  Non-cyclic GFR-binding peptide
  MOD_RES (2), (2): Xaa is C or S
KXQPSRVHHEPLTVLYY

SEQ ID NO: 4099 - protein, 15 aa, Artificial Sequence
  Non-cyclic GFR-binding peptide
  MOD_RES (1), (2): Xaa is C or S
XXAPTQLRPVQVRKI

SEQ ID NO: 4100 - protein, 10 aa, Artificial Sequence
  Non-cyclic GFR-binding peptide
EEEPLTMLYY

SEQ ID NO: 4101 - protein, 9 aa, Artificial Sequence
  Non-cyclic GFR-binding peptide
HEPLTVLYY

SEQ ID NO: 4102 - protein, 13 aa, Artificial Sequence
  Non-cyclic GFR-binding peptide
VPTELRSVKMAKV

SEQ ID NO: 4103 - protein, 17 aa, Artificial Sequence
  Non-cyclic GFR-binding peptide
  MOD_RES (3), (4): Xaa is C or S
KPXXAPTKLSNITVQIM

SEQ ID NO: 4104 - protein, 10 aa, Artificial Sequence
  Non-cyclic GFR-binding peptide
DLSNITIQIM

SEQ ID NO: 4105 - protein, 19 aa, Artificial Sequence
  Non-cyclic GFR-binding peptide
  MOD_RES (4), (4): Xaa is C or S
SVKXQPSRVHHEPLTVLYY

SEQ ID NO: 4106 - protein, 20 aa, Artificial Sequence
  Non-cyclic GFR-binding peptide
  MOD_RES (6), (7): Xaa is C or S
SIPKAXXVPTELRSVKMAKV

SEQ ID NO: 4107 - protein, 16 aa, Artificial Sequence
  Non-cyclic GFR-binding peptide
  MOD_RES (2), (3): Xaa is C or S
PXXAPTQLSNITVQIM

SEQ ID NO: 4108 - protein, 20 aa, Artificial Sequence
  Non-cyclic GFR-binding peptide
  MOD_RES (7), (7): Xaa is C or S
HVTKPTXAPTKLSNITVQIM

SEQ ID NO: 4109 - protein, 19 aa, Artificial Sequence
  Non-cyclic GFR-binding peptide
  MOD_RES (4), (4): Xaa is C or S
NVQXRPTQVQLEPLTVLYY

SEQ ID NO: 4110 - protein, 14 aa, Artificial Sequence
  Non-cyclic GFR-binding peptide
  MOD_RES (1), (1): Xaa is C or S
XAPTKLRPVQVRKI

SEQ ID NO: 4111 - protein, 16 aa, Artificial Sequence
  Non-cyclic GFR-binding peptide
  MOD_RES (14), (15): Xaa is C or S
FYLMSIANMKTPTXXP

SEQ ID NO: 4112 - protein, 9 aa, Artificial Sequence
  Non-cyclic GFR-binding peptide
FYLMSIANT

SEQ ID NO: 4113 - protein, 15 aa, Artificial Sequence
  Non-cyclic GFR-binding peptide
  MOD_RES (14), (15): Xaa is C or S
FYLMSIANTKVPAXX

SEQ ID NO: 4114 - protein, 9 aa, Artificial Sequence
  Non-cyclic GFR-binding peptide
FYLMSIANM

SEQ ID NO: 4115 - protein, 15 aa, Artificial Sequence
  Non-cyclic GFR-binding peptide
  MOD_RES (14), (15): Xaa is C or S
FYLMSIANMKTPTXX

SEQ ID NO: 4116 - protein, 11 aa, Artificial Sequence
  Non-cyclic GFR-binding peptide
FYLMSIANMKT

SEQ ID NO: 4117 - protein, 17 aa, Artificial Sequence
  Non-cyclic GFR-binding peptide
  MOD_RES (14), (15): Xaa is C or S
FYLMSIANMKTPTXXPG

SEQ ID NO: 4118 - protein, 18 aa, Artificial Sequence
  Non-cyclic GFR-binding peptide
  MOD_RES (14), (15): Xaa is C or S
FYLMSIANMKTPTXXPGA

SEQ ID NO: 4119 - protein, 19 aa, Artificial Sequence
  Non-cyclic GFR-binding peptide
  MOD_RES (14), (15): Xaa is C or S
FYLMSIANMKTPTXXPGAS

SEQ ID NO: 4120 - protein, 20 aa, Artificial Sequence
  Non-cyclic GFR-binding peptide
  MOD_RES (14), (15): Xaa is C or S
FYLMSIANMKTPTXXPGASG

SEQ ID NO: 4121 - protein, 10 aa, Artificial Sequence
  Non-cyclic GFR-binding peptide
FYLMSIANMK

SEQ ID NO: 4122 - protein, 10 aa, Artificial Sequence
  Non-cyclic GFR-binding peptide
FYLMSIANTK

SEQ ID NO: 4123 - protein, 18 aa, Artificial Sequence
  Non-cyclic GFR-binding peptide
  MOD_RES (14), (15): Xaa is C or S
FYLMSIANTKVPAXXTSP

SEQ ID NO: 4124 - protein, 13 aa, Artificial Sequence
  Non-cyclic GFR-binding peptide
FYLMSIANMKTPT

SEQ ID NO: 4125 - protein, 20 aa, Artificial Sequence
  Non-cyclic GFR-binding peptide
  MOD_RES (14), (15): Xaa is C or S
FYLMSIANTKVPAXXTSPVR

SEQ ID NO: 4126 - protein, 16 aa, Artificial Sequence
  Non-cyclic GFR-binding peptide
  MOD_RES (14), (15): Xaa is C or S
FYLMSIANTKVPAXXT

SEQ ID NO: 4127 - protein, 14 aa, Artificial Sequence
  Non-cyclic GFR-binding peptide
  MOD_RES (14), (14): Xaa is C or S
FYLMSIANTKVPAX

SEQ ID NO: 4128 - protein, 12 aa, Artificial Sequence
  Non-cyclic GFR-binding peptide
FYLMSIANTKVP

SEQ ID NO: 4129 - protein, 14 aa, Artificial Sequence
  Non-cyclic GFR-binding peptide
  MOD_RES (14), (14): Xaa is C or S
FYLMSIANMKTPTX

SEQ ID NO: 4130 - protein, 13 aa, Artificial Sequence
  Non-cyclic GFR-binding peptide
FYLMSIANTKVPA

SEQ ID NO: 4131 - protein, 19 aa, Artificial Sequence
  Non-cyclic GFR-binding peptide
  MOD_RES (14), (15): Xaa is C or S
FYLMSIANTKVPAXXTSPV

SEQ ID NO: 4132 - protein, 11 aa, Artificial Sequence
  Non-cyclic GFR-binding peptide
FYLMSIANTKV

SEQ ID NO: 4133 - protein, 12 aa, Artificial Sequence
  Non-cyclic GFR-binding peptide
FYLMSIANMKTP

SEQ ID NO: 4134 - protein, 17 aa, Artificial Sequence
  Non-cyclic GFR-binding peptide
  MOD_RES (14), (15): Xaa is C or S
FYLMSIANTKVPAXXTS

SEQ ID NO: 4135 - protein, 16 aa, Artificial Sequence
  Non-cyclic GFR-binding peptide
  MOD_RES (2), (3): Xaa is C or S
PXXTPTKMNAISMLYF

SEQ ID NO: 4136 - protein, 9 aa, Artificial Sequence
  Non-cyclic GFR-binding peptide
TNAISMLYF

SEQ ID NO: 4137 - protein, 15 aa, Artificial Sequence
  Non-cyclic GFR-binding peptide
  MOD_RES (1), (2): Xaa is C or S
XXAPVKTNAISMLYF

SEQ ID NO: 4138 - protein, 9 aa, Artificial Sequence
  Non-cyclic GFR-binding peptide
MNAISMLYF

SEQ ID NO: 4139 - protein, 15 aa, Artificial Sequence
  Non-cyclic GFR-binding peptide
  MOD_RES (1), (2): Xaa is C or S
XXTPTKMNAISMLYF

SEQ ID NO: 4140 - protein, 11 aa, Artificial Sequence
  Non-cyclic GFR-binding peptide
TKMNAISMLYF

SEQ ID NO: 4141 - protein, 17 aa, Artificial Sequence
  Non-cyclic GFR-binding peptide
  MOD_RES (3), (4): Xaa is C or S
GPXXTPTKMNAISMLYF

SEQ ID NO: 4142 - protein, 18 aa, Artificial Sequence
  Non-cyclic GFR-binding peptide
  MOD_RES (4), (5): Xaa is C or S
AGPXXTPTKMNAISMLYF

SEQ ID NO: 4143 - protein, 19 aa, Artificial Sequence
  Non-cyclic GFR-binding peptide
  MOD_RES (5), (6): Xaa is C or S
SAGPXXTPTKMNAISMLYF

SEQ ID NO: 4144 - protein, 20 aa, Artificial Sequence
  Non-cyclic GFR-binding peptide
  MOD_RES (6), (7): Xaa is C or S
GSAGPXXTPTKMNAISMLYF

SEQ ID NO: 4145 - protein, 10 aa, Artificial Sequence
  Non-cyclic GFR-binding peptide
KMNAISMLYF

SEQ ID NO: 4146 - protein, 10 aa, Artificial Sequence
  Non-cyclic GFR-binding peptide
KTNAISMLYF

SEQ ID NO: 4147 - protein, 18 aa, Artificial Sequence
  Non-cyclic GFR-binding peptide
  MOD_RES (4), (5): Xaa is C or S
PSTXXAPVKTNAISMLYF

SEQ ID NO: 4148 - protein, 13 aa, Artificial Sequence
  Non-cyclic GFR-binding peptide
TPTKMNAISMLYF

SEQ ID NO: 4149 - protein, 20 aa, Artificial Sequence
  Non-cyclic GFR-binding peptide
  MOD_RES (6), (7): Xaa is C or S
RVPSTXXAPVKTNAISMLYF

SEQ ID NO: 4150 - protein, 16 aa, Artificial Sequence
  Non-cyclic GFR-binding peptide
  MOD_RES (2), (3): Xaa is C or S
TXXAPVKTNAISMLYF

SEQ ID NO: 4151 - protein, 14 aa, Artificial Sequence
  Non-cyclic GFR-binding peptide
  MOD_RES (1), (1): Xaa is C or S
XAPVKTNAISMLYF

SEQ ID NO: 4152 - protein, 12 aa, Artificial Sequence
  Non-cyclic GFR-binding peptide
PVKTNAISMLYF

SEQ ID NO: 4153 - protein, 14 aa, Artificial Sequence
  Non-cyclic GFR-binding peptide
  MOD_RES (1), (1): Xaa is C or S
XTPTKMNAISMLYF

SEQ ID NO: 4154 - protein, 13 aa, Artificial Sequence
  Non-cyclic GFR-binding peptide
APVKTNAISMLYF

SEQ ID NO: 4155 - protein, 19 aa, Artificial Sequence
  Non-cyclic GFR-binding peptide
  MOD_RES (5), (6): Xaa is C or S
VPSTXXAPVKTNAISMLYF

SEQ ID NO: 4156 - protein, 11 aa, Artificial Sequence
  Non-cyclic GFR-binding peptide
VKTNAISMLYF

SEQ ID NO: 4157 - protein, 12 aa, Artificial Sequence
  Non-cyclic GFR-binding peptide
PTKMNAISMLYF

SEQ ID NO: 4158 - protein, 17 aa, Artificial Sequence
  Non-cyclic GFR-binding peptide
  MOD_RES (3), (4): Xaa is C or S
STXXAPVKTNAISMLYF

SEQ ID NO: 4159 - protein, 13 aa, Artificial Sequence
  Non-cyclic GFR-binding peptide
YYLISTASLRTPV

SEQ ID NO: 4160 - protein, 14 aa, Artificial Sequence
  Non-cyclic GFR-binding peptide
  MOD_RES (14), (14): Xaa is C or S
YYLISTASMKEPVX

SEQ ID NO: 4161 - protein, 18 aa, Artificial Sequence
  Non-cyclic GFR-binding peptide
  MOD_RES (14), (15): Xaa is C or S
FYLINIPSMKEPVXXPEP

SEQ ID NO: 4162 - protein, 20 aa, Artificial Sequence
  Non-cyclic GFR-binding peptide
  MOD_RES (14), (15): Xaa is C or S
KYLMSIPSMKTPTXXPGASG

SEQ ID NO: 4163 - protein, 11 aa, Artificial Sequence
  Non-cyclic GFR-binding peptide
KYLMSIPSMKT

SEQ ID NO: 4164 - protein, 9 aa, Artificial Sequence
  Non-cyclic GFR-binding peptide
KYLISIPSM

SEQ ID NO: 4165 - protein, 11 aa, Artificial Sequence
  Non-cyclic GFR-binding peptide
LYLISIPELRT

SEQ ID NO: 4166 - protein, 19 aa, Artificial Sequence
  Non-cyclic GFR-binding peptide
  MOD_RES (14), (15): Xaa is C or S
YYLMSTASTKVPAXXTSPV

SEQ ID NO: 4167 - protein, 16 aa, Artificial Sequence
  Non-cyclic GFR-binding peptide
  MOD_RES (14), (15): Xaa is C or S
KYLISIPSMKEPVXXP

SEQ ID NO: 4168 - protein, 12 aa, Artificial Sequence
  Non-cyclic GFR-binding peptide
LYLMSIPEMKTP

SEQ ID NO: 4169 - protein, 15 aa, Artificial Sequence
  Non-cyclic GFR-binding peptide
  MOD_RES (14), (15): Xaa is C or S
YYLISTASLRAPVXX

SEQ ID NO: 4170 - protein, 14 aa, Artificial Sequence
  Non-cyclic GFR-binding peptide
  MOD_RES (14), (14): Xaa is C or S
YYLISTASLRAPVX

SEQ ID NO: 4171 - protein, 14 aa, Artificial Sequence
  Non-cyclic GFR-binding peptide
  MOD_RES (14), (14): Xaa is C or S
FYLINIPSLDQPVX

SEQ ID NO: 4172 - protein, 17 aa, Artificial Sequence
  Non-cyclic GFR-binding peptide
  MOD_RES (14), (15): Xaa is C or S
FYLINIPSLAQPVXXPA

SEQ ID NO: 4173 - protein, 9 aa, Artificial Sequence
  Non-cyclic GFR-binding peptide
FYLISIANM

SEQ ID NO: 4174 - protein, 17 aa, Artificial Sequence
  Non-cyclic GFR-binding peptide
  MOD_RES (14), (15): Xaa is C or S
YYLMSTASMKTPTXXPG

SEQ ID NO: 4175 - protein, 17 aa, Artificial Sequence
  Non-cyclic GFR-binding peptide
  MOD_RES (14), (15): Xaa is C or S
FYLINIPSLDQPVXXPS

SEQ ID NO: 4176 - protein, 15 aa, Artificial Sequence
  Non-cyclic GFR-binding peptide
  MOD_RES (14), (15): Xaa is C or S
LYLMSIPEMKTPTXX

SEQ ID NO: 4177 - protein, 13 aa, Artificial Sequence
  Non-cyclic GFR-binding peptide
LYLMSIPEMKTPT

SEQ ID NO: 4178 - protein, 20 aa, Artificial Sequence
  Non-cyclic GFR-binding peptide
  MOD_RES (14), (15): Xaa is C or S
KYLVSIPSLKTPAXXPKPVH

SEQ ID NO: 4179 - protein, 15 aa, Artificial Sequence
  Non-cyclic GFR-binding peptide
  MOD_RES (14), (15): Xaa is C or S
YYLMSTASTKVPAXX

SEQ ID NO: 4180 - protein, 19 aa, Artificial Sequence
  Non-cyclic GFR-binding peptide
  MOD_RES (14), (15): Xaa is C or S
FYLINIPSLDQPVXXPSAS

SEQ ID NO: 4181 - protein, 20 aa, Artificial Sequence
  Non-cyclic GFR-binding peptide
  MOD_RES (14), (15): Xaa is C or S
YYLISTASMKEPVXXPEPIG

SEQ ID NO: 4182 - protein, 10 aa, Artificial Sequence
  Non-cyclic GFR-binding peptide
LYLMSIPETK

SEQ ID NO: 4183 - protein, 14 aa, Artificial Sequence
  Non-cyclic GFR-binding peptide
  MOD_RES (14), (14): Xaa is C or S
FYLINIPSLAQPVX

SEQ ID NO: 4184 - protein, 10 aa, Artificial Sequence
  Non-cyclic GFR-binding peptide
KYLMSIPSTK

SEQ ID NO: 4185 - protein, 17 aa, Artificial Sequence
  Non-cyclic GFR-binding peptide
  MOD_RES (14), (15): Xaa is C or S
YYLISTASLRTPVXXTP

SEQ ID NO: 4186 - protein, 18 aa, Artificial Sequence
  Non-cyclic GFR-binding peptide
  MOD_RES (14), (15): Xaa is C or S
LYLMSIPETKVPAXXTSP

SEQ ID NO: 4187 - protein, 20 aa, Artificial Sequence
  Non-cyclic GFR-binding peptide
  MOD_RES (14), (15): Xaa is C or S
YYLISTASLRAPVXXSAPAA

SEQ ID NO: 4188 - protein, 18 aa, Artificial Sequence
  Non-cyclic GFR-binding peptide
  MOD_RES (14), (15): Xaa is C or S
FYLINIPSLDQSVXXPSA

SEQ ID NO: 4189 - protein, 18 aa, Artificial Sequence
  Non-cyclic GFR-binding peptide
  MOD_RES (14), (15): Xaa is C or S
KYLISIPSLRTPVXXTPP

SEQ ID NO: 4190 - protein, 12 aa, Artificial Sequence
  Non-cyclic GFR-binding peptide
LYLMSIPETKVP

SEQ ID NO: 4191 - protein, 16 aa, Artificial Sequence
  Non-cyclic GFR-binding peptide
  MOD_RES (14), (15): Xaa is C or S
KYLMSIPSMKTPTXXP

SEQ ID NO: 4192 - protein, 12 aa, Artificial Sequence
  Non-cyclic GFR-binding peptide
FYLINIPSLDQP

SEQ ID NO: 4193 - protein, 14 aa, Artificial Sequence
  Non-cyclic GFR-binding peptide
  MOD_RES (14), (14): Xaa is C or S
YYLISTASLRTPVX

SEQ ID NO: 4194 - protein, 13 aa, Artificial Sequence
  Non-cyclic GFR-binding peptide
YYLMSTASTKVPA

SEQ ID NO: 4195 - protein, 12 aa, Artificial Sequence
  Non-cyclic GFR-binding peptide
YYLISTASLRTP

SEQ ID NO: 4196 - protein, 14 aa, Artificial Sequence
  Non-cyclic GFR-binding peptide
  MOD_RES (14), (14): Xaa is C or S
LYLMSIPEMKTPTX

SEQ ID NO: 4197 - protein, 18 aa, Artificial Sequence
  Non-cyclic GFR-binding peptide
  MOD_RES (14), (15): Xaa is C or S
YYLISTASLKTPVXXAKS

SEQ ID NO: 4198 - protein, 16 aa, Artificial Sequence
  Non-cyclic GFR-binding peptide
  MOD_RES (14), (15): Xaa is C or S
FYLISIANMKEPVXXP

SEQ ID NO: 4199 - protein, 20 aa, Artificial Sequence
  Non-cyclic GFR-binding peptide
  MOD_RES (14), (15): Xaa is C or S
KYLISIPSLRTPVXXTPPTS

SEQ ID NO: 4200 - protein, 15 aa, Artificial Sequence
  Non-cyclic GFR-binding peptide
  MOD_RES (14), (15): Xaa is C or S
YYLISTASLRTPVXX

SEQ ID NO: 4201 - protein, 14 aa, Artificial Sequence
  Non-cyclic GFR-binding peptide
  MOD_RES (14), (14): Xaa is C or S
FYLINIPSLDQSVX

SEQ ID NO: 4202 - protein, 10 aa, Artificial Sequence
  Non-cyclic GFR-binding peptide
YYLMSTASMK

SEQ ID NO: 4203 - protein, 17 aa, Artificial Sequence
  Non-cyclic GFR-binding peptide
  MOD_RES (14), (15): Xaa is C or S
FYLISIANMKEPVXXPE

SEQ ID NO: 4204 - protein, 14 aa, Artificial Sequence
  Non-cyclic GFR-binding peptide
  MOD_RES (14), (14): Xaa is C or S
YYLMSTASTKVPAX

SEQ ID NO: 4205 - protein, 16 aa, Artificial Sequence
  Non-cyclic GFR-binding peptide
  MOD_RES (14), (15): Xaa is C or S
LYLMSIPETKVPAXXT

SEQ ID NO: 4206 - protein, 15 aa, Artificial Sequence
  Non-cyclic GFR-binding peptide
  MOD_RES (14), (15): Xaa is C or S
FYLINIPSLDQPVXX

SEQ ID NO: 4207 - protein, 19 aa, Artificial Sequence
  Non-cyclic GFR-binding peptide
  MOD_RES (14), (15): Xaa is C or S
KYLISIPSMKEPVXXPEPI

SEQ ID NO: 4208 - protein, 19 aa, Artificial Sequence
  Non-cyclic GFR-binding peptide
  MOD_RES (14), (15): Xaa is C or S
YYLISTASLRTPVXXTPPT

SEQ ID NO: 4209 - protein, 20 aa, Artificial Sequence
  Non-cyclic GFR-binding peptide
  MOD_RES (14), (15): Xaa is C or S
YYLMSTASTKVPAXXTSPVR

SEQ ID NO: 4210 - protein, 11 aa, Artificial Sequence
  Non-cyclic GFR-binding peptide
LYLISIPEMKE

SEQ ID NO: 4211 - protein, 17 aa, Artificial Sequence
  Non-cyclic GFR-binding peptide
  MOD_RES (14), (15): Xaa is C or S
YYLISTASLRAPVXXSA

SEQ ID NO: 4212 - protein, 18 aa, Artificial Sequence
  Non-cyclic GFR-binding peptide
  MOD_RES (14), (15): Xaa is C or S
LYLISIPEMKEPVXXPEP

SEQ ID NO: 4213 - protein, 16 aa, Artificial Sequence
  Non-cyclic GFR-binding peptide
  MOD_RES (14), (15): Xaa is C or S
YYLMSTASMKTPTXXP

SEQ ID NO: 4214 - protein, 16 aa, Artificial Sequence
  Non-cyclic GFR-binding peptide
  MOD_RES (14), (15): Xaa is C or S
LYLISIPELRTPVXXT

SEQ ID NO: 4215 - protein, 13 aa, Artificial Sequence
  Non-cyclic GFR-binding peptide
FYLINIPSLDQPV

SEQ ID NO: 4216 - protein, 10 aa, Artificial Sequence
  Non-cyclic GFR-binding peptide
FYLINIPSLD

SEQ ID NO: 4217 - protein, 12 aa, Artificial Sequence
  Non-cyclic GFR-binding peptide
KYLMSIPSMKTP

SEQ ID NO: 4218 - protein, 10 aa, Artificial Sequence
  Non-cyclic GFR-binding peptide
FYLISIANMK

SEQ ID NO: 4219 - protein, 19 aa, Artificial Sequence
  Non-cyclic GFR-binding peptide
  MOD_RES (14), (15): Xaa is C or S
FYLINIPSLDQSVXXPSAS

SEQ ID NO: 4220 - protein, 12 aa, Artificial Sequence
  Non-cyclic GFR-binding peptide
LYLISIPELRTP

SEQ ID NO: 4221 - protein, 14 aa, Artificial Sequence
  Non-cyclic GFR-binding peptide
  MOD_RES (14), (14): Xaa is C or S
KYLISIPSLRTPVX

SEQ ID NO: 4222 - protein, 15 aa, Artificial Sequence
  Non-cyclic GFR-binding peptide
  MOD_RES (14), (15): Xaa is C or S
LYLISIPEMKEPVXX

SEQ ID NO: 4223 - protein, 20 aa, Artificial Sequence
  Non-cyclic GFR-binding peptide
  MOD_RES (14), (15): Xaa is C or S
FYLISIANMKEPVXXPEPIG

SEQ ID NO: 4224 - protein, 17 aa, Artificial Sequence
  Non-cyclic GFR-binding peptide
  MOD_RES (14), (15): Xaa is C or S
KYLISIPSMKEPVXXPE

SEQ ID NO: 4225 - protein, 9 aa, Artificial Sequence
  Non-cyclic GFR-binding peptide
LYLISIPEM

SEQ ID NO: 4226 - protein, 16 aa, Artificial Sequence
  Non-cyclic GFR-binding peptide
  MOD_RES (14), (15): Xaa is C or S
YYLISTASLRTPVXXT

SEQ ID NO: 4227 - protein, 10 aa, Artificial Sequence
  Non-cyclic GFR-binding peptide
FYLINIPSLA

SEQ ID NO: 4228 - protein, 13 aa, Artificial Sequence
  Non-cyclic GFR-binding peptide
FYLINIPSLAQPV

SEQ ID NO: 4229 - protein, 11 aa, Artificial Sequence
  Non-cyclic GFR-binding peptide
FYLISIANMKE

SEQ ID NO: 4230 - protein, 12 aa, Artificial Sequence
  Non-cyclic GFR-binding peptide
YYLMSTASTKVP

SEQ ID NO: 4231 - protein, 17 aa, Artificial Sequence
  Non-cyclic GFR-binding peptide
  MOD_RES (14), (15): Xaa is C or S
LYLISIPELRTPVXXTP

SEQ ID NO: 4232 - protein, 9 aa, Artificial Sequence
  Non-cyclic GFR-binding peptide
LYLMSIPET

SEQ ID NO: 4233 - protein, 13 aa, Artificial Sequence
  Non-cyclic GFR-binding peptide
KYLMSIPSMKTPT

SEQ ID NO: 4234 - protein, 13 aa, Artificial Sequence
  Non-cyclic GFR-binding peptide
YYLMSTASMKTPT

SEQ ID NO: 4235 - protein, 20 aa, Artificial Sequence
  Non-cyclic GFR-binding peptide
  MOD_RES (14), (15): Xaa is C or S
LYLISIPELRTPVXXTPPTS

SEQ ID NO: 4236 - protein, 10 aa, Artificial Sequence
  Non-cyclic GFR-binding peptide
KYLISIPSMK

SEQ ID NO: 4237 - protein, 13 aa, Artificial Sequence
  Non-cyclic GFR-binding peptide
FYLINIPSLDQSV

SEQ ID NO: 4238 - protein, 12 aa, Artificial Sequence
  Non-cyclic GFR-binding peptide
YYLISTASLRAP

SEQ ID NO: 4239 - protein, 17 aa, Artificial Sequence
  Non-cyclic GFR-binding peptide
  MOD_RES (14), (15): Xaa is C or S
LYLMSIPEMKTPTXXPG

SEQ ID NO: 4240 - protein, 18 aa, Artificial Sequence
  Non-cyclic GFR-binding peptide
  MOD_RES (14), (15): Xaa is C or S
YYLMSTASMKTPTXXPGA

SEQ ID NO: 4241 - protein, 19 aa, Artificial Sequence
  Non-cyclic GFR-binding peptide
  MOD_RES (14), (15): Xaa is C or S
KYLMSIPSTKVPAXXTSPV

SEQ ID NO: 4242 - protein, 16 aa, Artificial Sequence
  Non-cyclic GFR-binding peptide
  MOD_RES (14), (15): Xaa is C or S
YYLISTASLRAPVXXS

SEQ ID NO: 4243 - protein, 19 aa, Artificial Sequence
  Non-cyclic GFR-binding peptide
  MOD_RES (14), (15): Xaa is C or S
FYLISIANMKEPVXXPEPI

SEQ ID NO: 4244 - protein, 20 aa, Artificial Sequence
  Non-cyclic GFR-binding peptide
  MOD_RES (14), (15): Xaa is C or S
LYLVSIPELKTPAXXPKPVH

SEQ ID NO: 4245 - protein, 18 aa, Artificial Sequence
  Non-cyclic GFR-binding peptide
  MOD_RES (14), (15): Xaa is C or S
KYLISIPSMKEPVXXPEP

SEQ ID NO: 4246 - protein, 14 aa, Artificial Sequence
  Non-cyclic GFR-binding peptide
  MOD_RES (14), (14): Xaa is C or S
YYLISTASLKTPVX

SEQ ID NO: 4247 - protein, 13 aa, Artificial Sequence
  Non-cyclic GFR-binding peptide
FYLINIPSMKEPV

SEQ ID NO: 4248 - protein, 10 aa, Artificial Sequence
  Non-cyclic GFR-binding peptide
YYLISTASMK

SEQ ID NO: 4249 - protein, 12 aa, Artificial Sequence
  Non-cyclic GFR-binding peptide
KYLMSIPSTKVP

SEQ ID NO: 4250 - protein, 14 aa, Artificial Sequence
  Non-cyclic GFR-binding peptide
  MOD_RES (14), (14): Xaa is C or S
LYLISIPEMKEPVX

SEQ ID NO: 4251 - protein, 17 aa, Artificial Sequence
  Non-cyclic GFR-binding peptide
  MOD_RES (14), (15): Xaa is C or S
YYLISTASMKEPVXXPE

SEQ ID NO: 4252 - protein, 14 aa, Artificial Sequence
  Non-cyclic GFR-binding peptide
  MOD_RES (14), (14): Xaa is C or S
FYLISIANMKEPVX

SEQ ID NO: 4253 - protein, 17 aa, Artificial Sequence
  Non-cyclic GFR-binding peptide
  MOD_RES (14), (15): Xaa is C or S
YYLISTASLKTPVXXAK

SEQ ID NO: 4254 - protein, 11 aa, Artificial Sequence
  Non-cyclic GFR-binding peptide
KYLISIPSMKE

SEQ ID NO: 4255 - protein, 13 aa, Artificial Sequence
  Non-cyclic GFR-binding peptide
YYLISTASLRAPV

SEQ ID NO: 4256 - protein, 11 aa, Artificial Sequence
  Non-cyclic GFR-binding peptide
YYLISTASLKT

SEQ ID NO: 4257 - protein, 19 aa, Artificial Sequence
  Non-cyclic GFR-binding peptide
  MOD_RES (14), (15): Xaa is C or S
LYLISIPEMKEPVXXPEPI

SEQ ID NO: 4258 - protein, 11 aa, Artificial Sequence
  Non-cyclic GFR-binding peptide
LYLMSIPETKV

SEQ ID NO: 4259 - protein, 16 aa, Artificial Sequence
  Non-cyclic GFR-binding peptide
  MOD_RES (14), (15): Xaa is C or S
KYLISIPSLRTPVXXT

SEQ ID NO: 4260 - protein, 15 aa, Artificial Sequence
  Non-cyclic GFR-binding peptide
  MOD_RES (14), (15): Xaa is C or S
YYLISTASMKEPVXX

SEQ ID NO: 4261 - protein, 11 aa, Artificial Sequence
  Non-cyclic GFR-binding peptide
YYLISTASMKE

SEQ ID NO: 4262 - protein, 19 aa, Artificial Sequence
  Non-cyclic GFR-binding peptide
  MOD_RES (14), (15): Xaa is C or S
LYLISIPELRTPVXXTPPT

SEQ ID NO: 4263 - protein, 18 aa, Artificial Sequence
  Non-cyclic GFR-binding peptide
  MOD_RES (14), (15): Xaa is C or S
KYLMSIPSMKTPTXXPGA

SEQ ID NO: 4264 - protein, 14 aa, Artificial Sequence
  Non-cyclic GFR-binding peptide
  MOD_RES (14), (14): Xaa is C or S
LYLMSIPETKVPAX

SEQ ID NO: 4265 - protein, 18 aa, Artificial Sequence
  Non-cyclic GFR-binding peptide
  MOD_RES (14), (15): Xaa is C or S
LYLISIPELRTPVXXTPP

SEQ ID NO: 4266 - protein, 15 aa, Artificial Sequence
  Non-cyclic GFR-binding peptide
  MOD_RES (14), (15): Xaa is C or S
LYLMSIPETKVPAXX

SEQ ID NO: 4267 - protein, 16 aa, Artificial Sequence
  Non-cyclic GFR-binding peptide
  MOD_RES (14), (15): Xaa is C or S
YYLISTASMKEPVXXP

SEQ ID NO: 4268 - protein, 15 aa, Artificial Sequence
  Non-cyclic GFR-binding peptide
  MOD_RES (14), (15): Xaa is C or S
YYLISTASLKTPVXX

SEQ ID NO: 4269 - protein, 13 aa, Artificial Sequence
  Non-cyclic GFR-binding peptide
LYLISIPELRTPV

SEQ ID NO: 4270 - protein, 16 aa, Artificial Sequence
  Non-cyclic GFR-binding peptide
  MOD_RES (14), (15): Xaa is C or S
LYLMSIPEMKTPTXXP

SEQ ID NO: 4271 - protein, 20 aa, Artificial Sequence
  Non-cyclic GFR-binding peptide
  MOD_RES (14), (15): Xaa is C or S
YYLISTASLKTPVXXAKSAK

SEQ ID NO: 4272 - protein, 10 aa, Artificial Sequence
  Non-cyclic GFR-binding peptide
LYLMSIPEMK

SEQ ID NO: 4273 - protein, 12 aa, Artificial Sequence
  Non-cyclic GFR-binding peptide
FYLINIPSMKEP

SEQ ID NO: 4274 - protein, 18 aa, Artificial Sequence
  Non-cyclic GFR-binding peptide
  MOD_RES (14), (15): Xaa is C or S
YYLISTASMKEPVXXPEP

SEQ ID NO: 4275 - protein, 17 aa, Artificial Sequence
  Non-cyclic GFR-binding peptide
  MOD_RES (14), (15): Xaa is C or S
LYLMSIPETKVPAXXTS

SEQ ID NO: 4276 - protein, 19 aa, Artificial Sequence
  Non-cyclic GFR-binding peptide
  MOD_RES (14), (15): Xaa is C or S
YYLISTASMKEPVXXPEPI

SEQ ID NO: 4277 - protein, 18 aa, Artificial Sequence
  Non-cyclic GFR-binding peptide
  MOD_RES (14), (15): Xaa is C or S
YYLISTASLRTPVXXTPP

SEQ ID NO: 4278 - protein, 17 aa, Artificial Sequence
  Non-cyclic GFR-binding peptide
  MOD_RES (14), (15): Xaa is C or S
LYLISIPEMKEPVXXPE

SEQ ID NO: 4279 - protein, 15 aa, Artificial Sequence
  Non-cyclic GFR-binding peptide
  MOD_RES (14), (15): Xaa is C or S
KYLMSIPSTKVPAXX

SEQ ID NO: 4280 - protein, 10 aa, Artificial Sequence
  Non-cyclic GFR-binding peptide
YYLMSTASTK

SEQ ID NO: 4281 - protein, 10 aa, Artificial Sequence
  Non-cyclic GFR-binding peptide
KYLMSIPSMK

SEQ ID NO: 4282 - protein, 14 aa, Artificial Sequence
  Non-cyclic GFR-binding peptide
  MOD_RES (14), (14): Xaa is C or S
LYLISIPELRTPVX

SEQ ID NO: 4283 - protein, 11 aa, Artificial Sequence
  Non-cyclic GFR-binding peptide
YYLMSTASTKV

SEQ ID NO: 4284 - protein, 10 aa, Artificial Sequence
  Non-cyclic GFR-binding peptide
LYLISIPEMK

SEQ ID NO: 4285 - protein, 15 aa, Artificial Sequence
  Non-cyclic GFR-binding peptide
  MOD_RES (14), (15): Xaa is C or S
FYLISIANMKEPVXX

SEQ ID NO: 4286 - protein, 9 aa, Artificial Sequence
  Non-cyclic GFR-binding peptide
YYLISTASM

SEQ ID NO: 4287 - protein, 17 aa, Artificial Sequence
  Non-cyclic GFR-binding peptide
  MOD_RES (14), (15): Xaa is C or S
KYLMSIPSMKTPTXXPG

SEQ ID NO: 4288 - protein, 14 aa, Artificial Sequence
  Non-cyclic GFR-binding peptide
  MOD_RES (14), (14): Xaa is C or S
KYLMSIPSTKVPAX

SEQ ID NO: 4289 - protein, 20 aa, Artificial Sequence
  Non-cyclic GFR-binding peptide
  MOD_RES (14), (15): Xaa is C or S
LYLISIPEMKEPVXXPEPIG

SEQ ID NO: 4290 - protein, 11 aa, Artificial Sequence
  Non-cyclic GFR-binding peptide
FYLINIPSLAQ

SEQ ID NO: 4291 - protein, 19 aa, Artificial Sequence
  Non-cyclic GFR-binding peptide
  MOD_RES (14), (15): Xaa is C or S
KYLISIPSLRTPVXXTPPT

SEQ ID NO: 4292 - protein, 20 aa, Artificial Sequence
  Non-cyclic GFR-binding peptide
  MOD_RES (14), (15): Xaa is C or S
FYLINIPSLDQSVXXPSASA

SEQ ID NO: 4293 - protein, 16 aa, Artificial Sequence
  Non-cyclic GFR-binding peptide
  MOD_RES (14), (15): Xaa is C or S
FYLINIPSLDQPVXXP

SEQ ID NO: 4294 - protein, 19 aa, Artificial Sequence
  Non-cyclic GFR-binding peptide
  MOD_RES (14), (15): Xaa is C or S
YYLISTASLRAPVXXSAPA

SEQ ID NO: 4295 - protein, 18 aa, Artificial Sequence
  Non-cyclic GFR-binding peptide
  MOD_RES (14), (15): Xaa is C or S
LYLMSIPEMKTPTXXPGA

SEQ ID NO: 4296 - protein, 13 aa, Artificial Sequence
  Non-cyclic GFR-binding peptide
KYLISIPSMKEPV

SEQ ID NO: 4297 - protein, 15 aa, Artificial Sequence
  Non-cyclic GFR-binding peptide
  MOD_RES (14), (15): Xaa is C or S
KYLISIPSMKEPVXX

SEQ ID NO: 4298 - protein, 12 aa, Artificial Sequence
  Non-cyclic GFR-binding peptide
KYLISIPSLRTP

SEQ ID NO: 4299 - protein, 13 aa, Artificial Sequence
  Non-cyclic GFR-binding peptide
FYLISIANMKEPV

SEQ ID NO: 4300 - protein, 10 aa, Artificial Sequence
  Non-cyclic GFR-binding peptide
YYLISTASLK

SEQ ID NO: 4301 - protein, 20 aa, Artificial Sequence
  Non-cyclic GFR-binding peptide
  MOD_RES (14), (15): Xaa is C or S
YYLISTASLRTPVXXTPPTS

SEQ ID NO: 4302 - protein, 20 aa, Artificial Sequence
  Non-cyclic GFR-binding peptide
  MOD_RES (14), (15): Xaa is C or S
FYLINIPSMKEPVXXPEPIG

SEQ ID NO: 4303 - protein, 19 aa, Artificial Sequence
  Non-cyclic GFR-binding peptide
  MOD_RES (14), (15): Xaa is C or S
LYLMSIPETKVPAXXTSPV

SEQ ID NO: 4304 - protein, 20 aa, Artificial Sequence
  Non-cyclic GFR-binding peptide
  MOD_RES (14), (15): Xaa is C or S
KYLMSIPSTKVPAXXTSPVR

SEQ ID NO: 4305 - protein, 12 aa, Artificial Sequence
  Non-cyclic GFR-binding peptide
YYLMSTASMKTP

SEQ ID NO: 4306 - protein, 12 aa, Artificial Sequence
  Non-cyclic GFR-binding peptide
KYLISIPSMKEP

SEQ ID NO: 4307 - protein, 14 aa, Artificial Sequence
  Non-cyclic GFR-binding peptide
  MOD_RES (14), (14): Xaa is C or S
KYLISIPSMKEPVX

SEQ ID NO: 4308 - protein, 17 aa, Artificial Sequence
  Non-cyclic GFR-binding peptide
  MOD_RES (14), (15): Xaa is C or S
FYLINIPSMKEPVXXPE

SEQ ID NO: 4309 - protein, 18 aa, Artificial Sequence
  Non-cyclic GFR-binding peptide
  MOD_RES (14), (15): Xaa is C or S
FYLISIANMKEPVXXPEP

SEQ ID NO: 4310 - protein, 15 aa, Artificial Sequence
  Non-cyclic GFR-binding peptide
  MOD_RES (14), (15): Xaa is C or S
KYLISIPSLRTPVXX

SEQ ID NO: 4311 - protein, 12 aa, Artificial Sequence
  Non-cyclic GFR-binding peptide
FYLINIPSLAQP

SEQ ID NO: 4312 - protein, 9 aa, Artificial Sequence
  Non-cyclic GFR-binding peptide
LYLMSIPEM

SEQ ID NO: 4313 - protein, 20 aa, Artificial Sequence
  Non-cyclic GFR-binding peptide
  MOD_RES (14), (15): Xaa is C or S
YYLMSTASMKTPTXXPGASG

SEQ ID NO: 4314 - protein, 16 aa, Artificial Sequence
  Non-cyclic GFR-binding peptide
  MOD_RES (14), (15): Xaa is C or S
FYLINIPSMKEPVXXP

SEQ ID NO: 4315 - protein, 11 aa, Artificial Sequence
  Non-cyclic GFR-binding peptide
FYLINIPSLDQ

SEQ ID NO: 4316 - protein, 13 aa, Artificial Sequence
  Non-cyclic GFR-binding peptide
KYLISIPSLRTPV

SEQ ID NO: 4317 - protein, 19 aa, Artificial Sequence
  Non-cyclic GFR-binding peptide
  MOD_RES (14), (15): Xaa is C or S
YYLISTASLKTPVXXAKSA

SEQ ID NO: 4318 - protein, 12 aa, Artificial Sequence
  Non-cyclic GFR-binding peptide
FYLINIPSLDQS

SEQ ID NO: 4319 - protein, 13 aa, Artificial Sequence
  Non-cyclic GFR-binding peptide
KYLMSIPSTKVPA

SEQ ID NO: 4320 - protein, 20 aa, Artificial Sequence
  Non-cyclic GFR-binding peptide
  MOD_RES (14), (15): Xaa is C or S
FYLINIPSLAQPVXXPAASA

SEQ ID NO: 4321 - protein, 11 aa, Artificial Sequence
  Non-cyclic GFR-binding peptide
KYLISIPSLRT

SEQ ID NO: 4322 - protein, 17 aa, Artificial Sequence
  Non-cyclic GFR-binding peptide
  MOD_RES (14), (15): Xaa is C or S
KYLISIPSLRTPVXXTP

SEQ ID NO: 4323 - protein, 19 aa, Artificial Sequence
  Non-cyclic GFR-binding peptide
  MOD_RES (14), (15): Xaa is C or S
KYLMSIPSMKTPTXXPGAS

SEQ ID NO: 4324 - protein, 9 aa, Artificial Sequence
  Non-cyclic GFR-binding peptide
YYLMSTASM

SEQ ID NO: 4325 - protein, 16 aa, Artificial Sequence
  Non-cyclic GFR-binding peptide
  MOD_RES (14), (15): Xaa is C or S
LYLISIPEMKEPVXXP

SEQ ID NO: 4326 - protein, 19 aa, Artificial Sequence
  Non-cyclic GFR-binding peptide
  MOD_RES (14), (15): Xaa is C or S
FYLINIPSMKEPVXXPEPI

SEQ ID NO: 4327 - protein, 15 aa, Artificial Sequence
  Non-cyclic GFR-binding peptide
  MOD_RES (14), (15): Xaa is C or S
YYLMSTASMKTPTXX

SEQ ID NO: 4328 - protein, 20 aa, Artificial Sequence
  Non-cyclic GFR-binding peptide
  MOD_RES (14), (15): Xaa is C or S
LYLMSIPEMKTPTXXPGASG

SEQ ID NO: 4329 - protein, 11 aa, Artificial Sequence
  Non-cyclic GFR-binding peptide
LYLMSIPEMKT

SEQ ID NO: 4330 - protein, 15 aa, Artificial Sequence
  Non-cyclic GFR-binding peptide
  MOD_RES (14), (15): Xaa is C or S
FYLINIPSLAQPVXX

SEQ ID NO: 4331 - protein, 18 aa, Artificial Sequence
  Non-cyclic GFR-binding peptide
  MOD_RES (14), (15): Xaa is C or S
FYLINIPSLDQPVXXPSA

SEQ ID NO: 4332 - protein, 18 aa, Artificial Sequence
  Non-cyclic GFR-binding peptide
  MOD_RES (14), (15): Xaa is C or S
YYLMSTASTKVPAXXTSP

SEQ ID NO: 4333 - protein, 13 aa, Artificial Sequence
  Non-cyclic GFR-binding peptide
LYLISIPEMKEPV

SEQ ID NO: 4334 - protein, 18 aa, Artificial Sequence
  Non-cyclic GFR-binding peptide
  MOD_RES (14), (15): Xaa is C or S
YYLISTASLRAPVXXSAP

SEQ ID NO: 4335 - protein, 20 aa, Artificial Sequence
  Non-cyclic GFR-binding peptide
  MOD_RES (14), (15): Xaa is C or S
YYLVSTASLKTPAXXPKPVH

SEQ ID NO: 4336 - protein, 9 aa, Artificial Sequence
  Non-cyclic GFR-binding peptide
FYLINIPSM

SEQ ID NO: 4337 - protein, 18 aa, Artificial Sequence
  Non-cyclic GFR-binding peptide
  MOD_RES (14), (15): Xaa is C or S
FYLINIPSLAQPVXXPAA

SEQ ID NO: 4338 - protein, 15 aa, Artificial Sequence
  Non-cyclic GFR-binding peptide
  MOD_RES (14), (15): Xaa is C or S
FYLINIPSMKEPVXX

SEQ ID NO: 4339 - protein, 16 aa, Artificial Sequence
  Non-cyclic GFR-binding peptide
  MOD_RES (14), (15): Xaa is C or S
YYLISTASLKTPVXXA

SEQ ID NO: 4340 - protein, 19 aa, Artificial Sequence
  Non-cyclic GFR-binding peptide
  MOD_RES (14), (15): Xaa is C or S
YYLMSTASMKTPTXXPGAS

SEQ ID NO: 4341 - protein, 12 aa, Artificial Sequence
  Non-cyclic GFR-binding peptide
YYLISTASMKEP

SEQ ID NO: 4342 - protein, 11 aa, Artificial Sequence
  Non-cyclic GFR-binding peptide
FYLINIPSMKE

SEQ ID NO: 4343 - protein, 11 aa, Artificial Sequence
  Non-cyclic GFR-binding peptide
YYLISTASLRT

SEQ ID NO: 4344 - protein, 20 aa, Artificial Sequence
  Non-cyclic GFR-binding peptide
  MOD_RES (14), (15): Xaa is C or S
KYLISIPSMKEPVXXPEPIG

SEQ ID NO: 4345 - protein, 10 aa, Artificial Sequence
  Non-cyclic GFR-binding peptide
YYLISTASLR

SEQ ID NO: 4346 - protein, 15 aa, Artificial Sequence
  Non-cyclic GFR-binding peptide
  MOD_RES (14), (15): Xaa is C or S
FYLINIPSLDQSVXX

SEQ ID NO: 4347 - protein, 9 aa, Artificial Sequence
  Non-cyclic GFR-binding peptide
KYLMSIPSM

SEQ ID NO: 4348 - protein, 9 aa, Artificial Sequence
  Non-cyclic GFR-binding peptide
YYLMSTAST

SEQ ID NO: 4349 - protein, 16 aa, Artificial Sequence
  Non-cyclic GFR-binding peptide
  MOD_RES (14), (15): Xaa is C or S
FYLINIPSLAQPVXXP

SEQ ID NO: 4350 - protein, 11 aa, Artificial Sequence
  Non-cyclic GFR-binding peptide
KYLMSIPSTKV

SEQ ID NO: 4351 - protein, 12 aa, Artificial Sequence
  Non-cyclic GFR-binding peptide
LYLISIPEMKEP

SEQ ID NO: 4352 - protein, 18 aa, Artificial Sequence
  Non-cyclic GFR-binding peptide
  MOD_RES (14), (15): Xaa is C or S
KYLMSIPSTKVPAXXTSP

SEQ ID NO: 4353 - protein, 10 aa, Artificial Sequence
  Non-cyclic GFR-binding peptide
FYLINIPSMK

SEQ ID NO: 4354 - protein, 11 aa, Artificial Sequence
  Non-cyclic GFR-binding peptide
YYLMSTASMKT

SEQ ID NO: 4355 - protein, 20 aa, Artificial Sequence
  Non-cyclic GFR-binding peptide
  MOD_RES (14), (15): Xaa is C or S
LYLMSIPETKVPAXXTSPVR

SEQ ID NO: 4356 - protein, 14 aa, Artificial Sequence
  Non-cyclic GFR-binding peptide
  MOD_RES (14), (14): Xaa is C or S
YYLMSTASMKTPTX

SEQ ID NO: 4357 - protein, 12 aa, Artificial Sequence
  Non-cyclic GFR-binding peptide
YYLISTASLKTP

SEQ ID NO: 4358 - protein, 16 aa, Artificial Sequence
  Non-cyclic GFR-binding peptide
  MOD_RES (14), (15): Xaa is C or S
YYLMSTASTKVPAXXT

SEQ ID NO: 4359 - protein, 15 aa, Artificial Sequence
  Non-cyclic GFR-binding peptide
  MOD_RES (14), (15): Xaa is C or S
KYLMSIPSMKTPTXX

SEQ ID NO: 4360 - protein, 16 aa, Artificial Sequence
  Non-cyclic GFR-binding peptide
  MOD_RES (14), (15): Xaa is C or S
FYLINIPSLDQSVXXP

SEQ ID NO: 4361 - protein, 17 aa, Artificial Sequence
  Non-cyclic GFR-binding peptide
  MOD_RES (14), (15): Xaa is C or S
YYLMSTASTKVPAXXTS

SEQ ID NO: 4362 - protein, 13 aa, Artificial Sequence
  Non-cyclic GFR-binding peptide
YYLISTASMKEPV

SEQ ID NO: 4363 - protein, 19 aa, Artificial Sequence
  Non-cyclic GFR-binding peptide
  MOD_RES (14), (15): Xaa is C or S
LYLMSIPEMKTPTXXPGAS

SEQ ID NO: 4364 - protein, 12 aa, Artificial Sequence
  Non-cyclic GFR-binding peptide
FYLISIANMKEP

SEQ ID NO: 4365 - protein, 13 aa, Artificial Sequence
  Non-cyclic GFR-binding peptide
LYLMSIPETKVPA

SEQ ID NO: 4366 - protein, 16 aa, Artificial Sequence
  Non-cyclic GFR-binding peptide
  MOD_RES (14), (15): Xaa is C or S
KYLMSIPSTKVPAXXT

SEQ ID NO: 4367 - protein, 17 aa, Artificial Sequence
  Non-cyclic GFR-binding peptide
  MOD_RES (14), (15): Xaa is C or S
FYLINIPSLDQSVXXPS

SEQ ID NO: 4368 - protein, 9 aa, Artificial Sequence
  Non-cyclic GFR-binding peptide
KYLMSIPST

SEQ ID NO: 4369 - protein, 20 aa, Artificial Sequence
  Non-cyclic GFR-binding peptide
  MOD_RES (14), (15): Xaa is C or S
FYLINIPSLDQPVXXPSASA

SEQ ID NO: 4370 - protein, 11 aa, Artificial Sequence
  Non-cyclic GFR-binding peptide
YYLISTASLRA

SEQ ID NO: 4371 - protein, 13 aa, Artificial Sequence
  Non-cyclic GFR-binding peptide
YYLISTASLKTPV

SEQ ID NO: 4372 - protein, 19 aa, Artificial Sequence
  Non-cyclic GFR-binding peptide
  MOD_RES (14), (15): Xaa is C or S
FYLINIPSLAQPVXXPAAS

SEQ ID NO: 4373 - protein, 17 aa, Artificial Sequence
  Non-cyclic GFR-binding peptide
  MOD_RES (14), (15): Xaa is C or S
KYLMSIPSTKVPAXXTS

SEQ ID NO: 4374 - protein, 15 aa, Artificial Sequence
  Non-cyclic GFR-binding peptide
  MOD_RES (14), (15): Xaa is C or S
LYLISIPELRTPVXX

SEQ ID NO: 4375 - protein, 14 aa, Artificial Sequence
  Non-cyclic GFR-binding peptide
  MOD_RES (14), (14): Xaa is C or S
KYLMSIPSMKTPTX

SEQ ID NO: 4376 - protein, 14 aa, Artificial Sequence
  Non-cyclic GFR-binding peptide
  MOD_RES (14), (14): Xaa is C or S
FYLINIPSMKEPVX

SEQ ID NO: 4377 - protein, 13 aa, Artificial Sequence
  Non-cyclic GFR-binding peptide
VPTRLSATSILYY

SEQ ID NO: 4378 - protein, 14 aa, Artificial Sequence
  Non-cyclic GFR-binding peptide
  MOD_RES (1), (1): Xaa is C or S
XVPEKMSATSILYY

SEQ ID NO: 4379 - protein, 18 aa, Artificial Sequence
  Non-cyclic GFR-binding peptide
  MOD_RES (4), (5): Xaa is C or S
PEPXXVPEKMSPINILYF

SEQ ID NO: 4380 - protein, 20 aa, Artificial Sequence
  Non-cyclic GFR-binding peptide
  MOD_RES (6), (7): Xaa is C or S
GSAGPXXTPTKMSPISMLYK

SEQ ID NO: 4381 - protein, 11 aa, Artificial Sequence
  Non-cyclic GFR-binding peptide
TKMSPISMLYK

SEQ ID NO: 4382 - protein, 9 aa, Artificial Sequence
  Non-cyclic GFR-binding peptide
MSPISILYK

SEQ ID NO: 4383 - protein, 11 aa, Artificial Sequence
  Non-cyclic GFR-binding peptide
TRLEPISILYL

SEQ ID NO: 4384 - protein, 19 aa, Artificial Sequence
  Non-cyclic GFR-binding peptide
  MOD_RES (5), (6): Xaa is C or S
VPSTXXAPVKTSATSMLYY

SEQ ID NO: 4385 - protein, 16 aa, Artificial Sequence
  Non-cyclic GFR-binding peptide
  MOD_RES (2), (3): Xaa is C or S
PXXVPEKMSPISILYK

SEQ ID NO: 4386 - protein, 12 aa, Artificial Sequence
  Non-cyclic GFR-binding peptide
PTKMEPISMLYL

SEQ ID NO: 4387 - protein, 15 aa, Artificial Sequence
  Non-cyclic GFR-binding peptide
  MOD_RES (1), (2): Xaa is C or S
XXVPARLSATSILYY

SEQ ID NO: 4388 - protein, 14 aa, Artificial Sequence
  Non-cyclic GFR-binding peptide
  MOD_RES (1), (1): Xaa is C or S
XVPARLSATSILYY

SEQ ID NO: 4389 - protein, 14 aa, Artificial Sequence
  Non-cyclic GFR-binding peptide
  MOD_RES (1), (1): Xaa is C or S
XVPQDLSPINILYF

SEQ ID NO: 4390 - protein, 17 aa, Artificial Sequence
  Non-cyclic GFR-binding peptide
  MOD_RES (3), (4): Xaa is C or S
APXXVPQALSPINILYF

SEQ ID NO: 4391 - protein, 9 aa, Artificial Sequence
  Non-cyclic GFR-binding peptide
MNAISILYF

SEQ ID NO: 4392 - protein, 17 aa, Artificial Sequence
  Non-cyclic GFR-binding peptide
  MOD_RES (3), (4): Xaa is C or S
GPXXTPTKMSATSMLYY

SEQ ID NO: 4393 - protein, 17 aa, Artificial Sequence
  Non-cyclic GFR-binding peptide
  MOD_RES (3), (4): Xaa is C or S
SPXXVPQDLSPINILYF

SEQ ID NO: 4394 - protein, 15 aa, Artificial Sequence
  Non-cyclic GFR-binding peptide
  MOD_RES (1), (2): Xaa is C or S
XXTPTKMEPISMLYL

SEQ ID NO: 4395 - protein, 13 aa, Artificial Sequence
  Non-cyclic GFR-binding peptide
TPTKMEPISMLYL

SEQ ID NO: 4396 - protein, 20 aa, Artificial Sequence
  Non-cyclic GFR-binding peptide
  MOD_RES (6), (7): Xaa is C or S
HVPKPXXAPTKLSPISVLYK

SEQ ID NO: 4397 - protein, 15 aa, Artificial Sequence
  Non-cyclic GFR-binding peptide
  MOD_RES (1), (2): Xaa is C or S
XXAPVKTSATSMLYY

SEQ ID NO: 4398 - protein, 19 aa, Artificial Sequence
  Non-cyclic GFR-binding peptide
  MOD_RES (5), (6): Xaa is C or S
SASPXXVPQDLSPINILYF

SEQ ID NO: 4399 - protein, 20 aa, Artificial Sequence
  Non-cyclic GFR-binding peptide
  MOD_RES (6), (7): Xaa is C or S
GIPEPXXVPEKMSATSILYY

SEQ ID NO: 4400 - protein, 10 aa, Artificial Sequence
  Non-cyclic GFR-binding peptide
KTEPISMLYL

SEQ ID NO: 4401 - protein, 14 aa, Artificial Sequence
  Non-cyclic GFR-binding peptide
  MOD_RES (1), (1): Xaa is C or S
XVPQALSPINILYF

SEQ ID NO: 4402 - protein, 10 aa, Artificial Sequence
  Non-cyclic GFR-binding peptide
KTSPISMLYK

SEQ ID NO: 4403 - protein, 17 aa, Artificial Sequence
  Non-cyclic GFR-binding peptide
  MOD_RES (3), (4): Xaa is C or S
PTXXVPTRLSATSILYY

SEQ ID NO: 4404 - protein, 18 aa, Artificial Sequence
  Non-cyclic GFR-binding peptide
  MOD_RES (4), (5): Xaa is C or S
PSTXXAPVKTEPISMLYL

SEQ ID NO: 4405 - protein, 20 aa, Artificial Sequence
  Non-cyclic GFR-binding peptide
  MOD_RES (6), (7): Xaa is C or S
AAPASXXVPARLSATSILYY

SEQ ID NO: 4406 - protein, 18 aa, Artificial Sequence
  Non-cyclic GFR-binding peptide
  MOD_RES (4), (5): Xaa is C or S
ASPXXVSQDLSPINILYF

SEQ ID NO: 4407 - protein, 18 aa, Artificial Sequence
  Non-cyclic GFR-binding peptide
  MOD_RES (4), (5): Xaa is C or S
PPTXXVPTRLSPISILYK

SEQ ID NO: 4408 - protein, 12 aa, Artificial Sequence
  Non-cyclic GFR-binding peptide
PVKTEPISMLYL

SEQ ID NO: 4409 - protein, 16 aa, Artificial Sequence
  Non-cyclic GFR-binding peptide
  MOD_RES (2), (3): Xaa is C or S
PXXTPTKMSPISMLYK

SEQ ID NO: 4410 - protein, 12 aa, Artificial Sequence
  Non-cyclic GFR-binding peptide
PQDLSPINILYF

SEQ ID NO: 4411 - protein, 14 aa, Artificial Sequence
  Non-cyclic GFR-binding peptide
  MOD_RES (1), (1): Xaa is C or S
XVPTRLSATSILYY

SEQ ID NO: 4412 - protein, 13 aa, Artificial Sequence
  Non-cyclic GFR-binding peptide
APVKTSATSMLYY

SEQ ID NO: 4413 - protein, 12 aa, Artificial Sequence
  Non-cyclic GFR-binding peptide
PTRLSATSILYY

SEQ ID NO: 4414 - protein, 14 aa, Artificial Sequence
  Non-cyclic GFR-binding peptide
  MOD_RES (1), (1): Xaa is C or S
XTPTKMEPISMLYL

SEQ ID NO: 4415 - protein, 18 aa, Artificial Sequence
  Non-cyclic GFR-binding peptide
  MOD_RES (4), (5): Xaa is C or S
SKAXXVPTKLSATSILYY

SEQ ID NO: 4416 - protein, 16 aa, Artificial Sequence
  Non-cyclic GFR-binding peptide
  MOD_RES (2), (3): Xaa is C or S
PXXVPEKMNAISILYF

SEQ ID NO: 4417 - protein, 20 aa, Artificial Sequence
  Non-cyclic GFR-binding peptide
  MOD_RES (6), (7): Xaa is C or S
STPPTXXVPTRLSPISILYK

SEQ ID NO: 4418 - protein, 15 aa, Artificial Sequence
  Non-cyclic GFR-binding peptide
  MOD_RES (1), (2): Xaa is C or S
XXVPTRLSATSILYY

SEQ ID NO: 4419 - protein, 14 aa, Artificial Sequence
  Non-cyclic GFR-binding peptide
  MOD_RES (1), (1): Xaa is C or S
XVSQDLSPINILYF

SEQ ID NO: 4420 - protein, 10 aa, Artificial Sequence
  Non-cyclic GFR-binding peptide
KMSATSMLYY

SEQ ID NO: 4421 - protein, 17 aa, Artificial Sequence
  Non-cyclic GFR-binding peptide
  MOD_RES (3), (4): Xaa is C or S
EPXXVPEKMNAISILYF

SEQ ID NO: 4422 - protein, 14 aa, Artificial Sequence
  Non-cyclic GFR-binding peptide
  MOD_RES (1), (1): Xaa is C or S
XAPVKTSATSMLYY

SEQ ID NO: 4423 - protein, 16 aa, Artificial Sequence
  Non-cyclic GFR-binding peptide
  MOD_RES (2), (3): Xaa is C or S
TXXAPVKTEPISMLYL

SEQ ID NO: 4424 - protein, 15 aa, Artificial Sequence
  Non-cyclic GFR-binding peptide
  MOD_RES (1), (2): Xaa is C or S
XXVPQDLSPINILYF

SEQ ID NO: 4425 - protein, 19 aa, Artificial Sequence
  Non-cyclic GFR-binding peptide
  MOD_RES (5), (6): Xaa is C or S
IPEPXXVPEKMSPISILYK

SEQ ID NO: 4426 - protein, 19 aa, Artificial Sequence
  Non-cyclic GFR-binding peptide
  MOD_RES (5), (6): Xaa is C or S
TPPTXXVPTRLSATSILYY

SEQ ID NO: 4427 - protein, 20 aa, Artificial Sequence
  Non-cyclic GFR-binding peptide
  MOD_RES (6), (7): Xaa is C or S
RVPSTXXAPVKTSATSMLYY

SEQ ID NO: 4428 - protein, 11 aa, Artificial Sequence
  Non-cyclic GFR-binding peptide
EKMEPISILYL

SEQ ID NO: 4429 - protein, 17 aa, Artificial Sequence
  Non-cyclic GFR-binding peptide
  MOD_RES (3), (4): Xaa is C or S
ASXXVPARLSATSILYY

SEQ ID NO: 4430 - protein, 18 aa, Artificial Sequence
  Non-cyclic GFR-binding peptide
  MOD_RES (4), (5): Xaa is C or S
PEPXXVPEKMEPISILYL

SEQ ID NO: 4431 - protein, 16 aa, Artificial Sequence
  Non-cyclic GFR-binding peptide
  MOD_RES (2), (3): Xaa is C or S
PXXTPTKMSATSMLYY

SEQ ID NO: 4432 - protein, 16 aa, Artificial Sequence
  Non-cyclic GFR-binding peptide
  MOD_RES (2), (3): Xaa is C or S
TXXVPTRLEPISILYL

SEQ ID NO: 4433 - protein, 13 aa, Artificial Sequence
  Non-cyclic GFR-binding peptide
VPQDLSPINILYF

SEQ ID NO: 4434 - protein, 10 aa, Artificial Sequence
  Non-cyclic GFR-binding peptide
DLSPINILYF

SEQ ID NO: 4435 - protein, 12 aa, Artificial Sequence
  Non-cyclic GFR-binding peptide
PTKMSPISMLYK

SEQ ID NO: 4436 - protein, 10 aa, Artificial Sequence
  Non-cyclic GFR-binding peptide
KMNAISILYF

SEQ ID NO: 4437 - protein, 19 aa, Artificial Sequence
  Non-cyclic GFR-binding peptide
  MOD_RES (5), (6): Xaa is C or S
SASPXXVSQDLSPINILYF

SEQ ID NO: 4438 - protein, 12 aa, Artificial Sequence
  Non-cyclic GFR-binding peptide
PTRLEPISILYL

SEQ ID NO: 4439 - protein, 14 aa, Artificial Sequence
  Non-cyclic GFR-binding peptide
  MOD_RES (1), (1): Xaa is C or S
XVPTRLSPISILYK

SEQ ID NO: 4440 - protein, 15 aa, Artificial Sequence
  Non-cyclic GFR-binding peptide
  MOD_RES (1), (2): Xaa is C or S
XXVPEKMEPISILYL

SEQ ID NO: 4441 - protein, 20 aa, Artificial Sequence
  Non-cyclic GFR-binding peptide
  MOD_RES (6), (7): Xaa is C or S
GIPEPXXVPEKMNAISILYF

SEQ ID NO: 4442 - protein, 17 aa, Artificial Sequence
  Non-cyclic GFR-binding peptide
  MOD_RES (3), (4): Xaa is C or S
EPXXVPEKMSPISILYK

SEQ ID NO: 4443 - protein, 9 aa, Artificial Sequence
  Non-cyclic GFR-binding peptide
MEPISILYL

SEQ ID NO: 4444 - protein, 16 aa, Artificial Sequence
  Non-cyclic GFR-binding peptide
  MOD_RES (2), (3): Xaa is C or S
TXXVPTRLSATSILYY

SEQ ID NO: 4445 - protein, 10 aa, Artificial Sequence
  Non-cyclic GFR-binding peptide
ALSPINILYF

SEQ ID NO: 4446 - protein, 13 aa, Artificial Sequence
  Non-cyclic GFR-binding peptide
VPQALSPINILYF

SEQ ID NO: 4447 - protein, 11 aa, Artificial Sequence
  Non-cyclic GFR-binding peptide
EKMNAISILYF

SEQ ID NO: 4448 - protein, 12 aa, Artificial Sequence
  Non-cyclic GFR-binding peptide
PVKTSATSMLYY

SEQ ID NO: 4449 - protein, 17 aa, Artificial Sequence
  Non-cyclic GFR-binding peptide
  MOD_RES (3), (4): Xaa is C or S
PTXXVPTRLEPISILYL

SEQ ID NO: 4450 - protein, 9 aa, Artificial Sequence
  Non-cyclic GFR-binding peptide
TEPISMLYL

SEQ ID NO: 4451 - protein, 13 aa, Artificial Sequence
  Non-cyclic GFR-binding peptide
TPTKMSPISMLYK

SEQ ID NO: 4452 - protein, 13 aa, Artificial Sequence
  Non-cyclic GFR-binding peptide
TPTKMSATSMLYY

SEQ ID NO: 4453 - protein, 20 aa, Artificial Sequence
  Non-cyclic GFR-binding peptide
  MOD_RES (6), (7): Xaa is C or S
STPPTXXVPTRLEPISILYL

SEQ ID NO: 4454 - protein, 10 aa, Artificial Sequence
  Non-cyclic GFR-binding peptide
KMSPISILYK

SEQ ID NO: 4455 - protein, 13 aa, Artificial Sequence
  Non-cyclic GFR-binding peptide
VSQDLSPINILYF

SEQ ID NO: 4456 - protein, 12 aa, Artificial Sequence
  Non-cyclic GFR-binding peptide
PARLSATSILYY

SEQ ID NO: 4457 - protein, 17 aa, Artificial Sequence
  Non-cyclic GFR-binding peptide
  MOD_RES (3), (4): Xaa is C or S
GPXXTPTKMEPISMLYL

SEQ ID NO: 4458 - protein, 18 aa, Artificial Sequence
  Non-cyclic GFR-binding peptide
  MOD_RES (4), (5): Xaa is C or S
AGPXXTPTKMSATSMLYY

SEQ ID NO: 4459 - protein, 19 aa, Artificial Sequence
  Non-cyclic GFR-binding peptide
  MOD_RES (5), (6): Xaa is C or S
VPSTXXAPVKTSPISMLYK

SEQ ID NO: 4460 - protein, 16 aa, Artificial Sequence
  Non-cyclic GFR-binding peptide
  MOD_RES (2), (3): Xaa is C or S
SXXVPARLSATSILYY

SEQ ID NO: 4461 - protein, 19 aa, Artificial Sequence
  Non-cyclic GFR-binding peptide
  MOD_RES (5), (6): Xaa is C or S
IPEPXXVPEKMNAISILYF

SEQ ID NO: 4462 - protein, 20 aa, Artificial Sequence
  Non-cyclic GFR-binding peptide
  MOD_RES (6), (7): Xaa is C or S
HVPKPXXAPTKLEPISVLYL

SEQ ID NO: 4463 - protein, 18 aa, Artificial Sequence
  Non-cyclic GFR-binding peptide
  MOD_RES (4), (5): Xaa is C or S
PEPXXVPEKMSPISILYK

SEQ ID NO: 4464 - protein, 14 aa, Artificial Sequence
  Non-cyclic GFR-binding peptide
  MOD_RES (1), (1): Xaa is C or S
XVPTKLSATSILYY

SEQ ID NO: 4465 - protein, 13 aa, Artificial Sequence
  Non-cyclic GFR-binding peptide
VPEKMSPINILYF

SEQ ID NO: 4466 - protein, 10 aa, Artificial Sequence
  Non-cyclic GFR-binding peptide
KMSATSILYY

SEQ ID NO: 4467 - protein, 12 aa, Artificial Sequence
  Non-cyclic GFR-binding peptide
PVKTSPISMLYK

SEQ ID NO: 4468 - protein, 14 aa, Artificial Sequence
  Non-cyclic GFR-binding peptide
  MOD_RES (1), (1): Xaa is C or S
XVPEKMEPISILYL

SEQ ID NO: 4469 - protein, 17 aa, Artificial Sequence
  Non-cyclic GFR-binding peptide
  MOD_RES (3), (4): Xaa is C or S
EPXXVPEKMSATSILYY

SEQ ID NO: 4470 - protein, 14 aa, Artificial Sequence
  Non-cyclic GFR-binding peptide
  MOD_RES (1), (1): Xaa is C or S
XVPEKMNAISILYF

SEQ ID NO: 4471 - protein, 17 aa, Artificial Sequence
  Non-cyclic GFR-binding peptide
  MOD_RES (3), (4): Xaa is C or S
KAXXVPTKLSATSILYY

SEQ ID NO: 4472 - protein, 11 aa, Artificial Sequence
  Non-cyclic GFR-binding peptide
EKMSPISILYK

SEQ ID NO: 4473 - protein, 13 aa, Artificial Sequence
  Non-cyclic GFR-binding peptide
VPARLSATSILYY

SEQ ID NO: 4474 - protein, 11 aa, Artificial Sequence
  Non-cyclic GFR-binding peptide
TKLSATSILYY

SEQ ID NO: 4475 - protein, 19 aa, Artificial Sequence
  Non-cyclic GFR-binding peptide
  MOD_RES (5), (6): Xaa is C or S
IPEPXXVPEKMEPISILYL

SEQ ID NO: 4476 - protein, 11 aa, Artificial Sequence
  Non-cyclic GFR-binding peptide
VKTEPISMLYL

SEQ ID NO: 4477 - protein, 16 aa, Artificial Sequence
  Non-cyclic GFR-binding peptide
  MOD_RES (2), (3): Xaa is C or S
TXXVPTRLSPISILYK

SEQ ID NO: 4478 - protein, 15 aa, Artificial Sequence
  Non-cyclic GFR-binding peptide
  MOD_RES (1), (2): Xaa is C or S
XXVPEKMSATSILYY

SEQ ID NO: 4479 - protein, 11 aa, Artificial Sequence
  Non-cyclic GFR-binding peptide
EKMSATSILYY

SEQ ID NO: 4480 - protein, 19 aa, Artificial Sequence
  Non-cyclic GFR-binding peptide
  MOD_RES (5), (6): Xaa is C or S
TPPTXXVPTRLEPISILYL

SEQ ID NO: 4481 - protein, 18 aa, Artificial Sequence
  Non-cyclic GFR-binding peptide
  MOD_RES (4), (5): Xaa is C or S
AGPXXTPTKMSPISMLYK

SEQ ID NO: 4482 - protein, 14 aa, Artificial Sequence
  Non-cyclic GFR-binding peptide
  MOD_RES (1), (1): Xaa is C or S
XAPVKTEPISMLYL

SEQ ID NO: 4483 - protein, 18 aa, Artificial Sequence
  Non-cyclic GFR-binding peptide
  MOD_RES (4), (5): Xaa is C or S
PPTXXVPTRLEPISILYL

SEQ ID NO: 4484 - protein, 15 aa, Artificial Sequence
  Non-cyclic GFR-binding peptide
  MOD_RES (1), (2): Xaa is C or S
XXAPVKTEPISMLYL

SEQ ID NO: 4485 - protein, 16 aa, Artificial Sequence
  Non-cyclic GFR-binding peptide
  MOD_RES (2), (3): Xaa is C or S
PXXVPEKMSATSILYY

SEQ ID NO: 4486 - protein, 15 aa, Artificial Sequence
  Non-cyclic GFR-binding peptide
  MOD_RES (1), (2): Xaa is C or S
XXVPTKLSATSILYY

SEQ ID NO: 4487 - protein, 13 aa, Artificial Sequence
  Non-cyclic GFR-binding peptide
VPTRLEPISILYL

SEQ ID NO: 4488 - protein, 16 aa, Artificial Sequence
  Non-cyclic GFR-binding peptide
  MOD_RES (2), (3): Xaa is C or S
PXXTPTKMEPISMLYL

SEQ ID NO: 4489 - protein, 20 aa, Artificial Sequence
  Non-cyclic GFR-binding peptide
  MOD_RES (6), (7): Xaa is C or S
KASKAXXVPTKLSATSILYY

SEQ ID NO: 4490 - protein, 10 aa, Artificial Sequence
  Non-cyclic GFR-binding peptide
KMEPISMLYL

SEQ ID NO: 4491 - protein, 12 aa, Artificial Sequence
  Non-cyclic GFR-binding peptide
PEKMSPINILYF

SEQ ID NO: 4492 - protein, 18 aa, Artificial Sequence
  Non-cyclic GFR-binding peptide
  MOD_RES (4), (5): Xaa is C or S
PEPXXVPEKMSATSILYY

SEQ ID NO: 4493 - protein, 17 aa, Artificial Sequence
  Non-cyclic GFR-binding peptide
  MOD_RES (3), (4): Xaa is C or S
STXXAPVKTEPISMLYL

SEQ ID NO: 4494 - protein, 19 aa, Artificial Sequence
  Non-cyclic GFR-binding peptide
  MOD_RES (5), (6): Xaa is C or S
IPEPXXVPEKMSATSILYY

SEQ ID NO: 4495 - protein, 18 aa, Artificial Sequence
  Non-cyclic GFR-binding peptide
  MOD_RES (4), (5): Xaa is C or S
PPTXXVPTRLSATSILYY

SEQ ID NO: 4496 - protein, 17 aa, Artificial Sequence
  Non-cyclic GFR-binding peptide
  MOD_RES (3), (4): Xaa is C or S
EPXXVPEKMEPISILYL

SEQ ID NO: 4497 - protein, 15 aa, Artificial Sequence
  Non-cyclic GFR-binding peptide
  MOD_RES (1), (2): Xaa is C or S
XXAPVKTSPISMLYK

SEQ ID NO: 4498 - protein, 10 aa, Artificial Sequence
  Non-cyclic GFR-binding peptide
KTSATSMLYY

SEQ ID NO: 4499 - protein, 10 aa, Artificial Sequence
  Non-cyclic GFR-binding peptide
KMSPISMLYK

SEQ ID NO: 4500 - protein, 14 aa, Artificial Sequence
  Non-cyclic GFR-binding peptide
  MOD_RES (1), (1): Xaa is C or S
XVPTRLEPISILYL

SEQ ID NO: 4501 - protein, 11 aa, Artificial Sequence
  Non-cyclic GFR-binding peptide
VKTSATSMLYY

SEQ ID NO: 4502 - protein, 10 aa, Artificial Sequence
  Non-cyclic GFR-binding peptide
KMEPISILYL

SEQ ID NO: 4503 - protein, 15 aa, Artificial Sequence
  Non-cyclic GFR-binding peptide
  MOD_RES (1), (2): Xaa is C or S
XXVPEKMNAISILYF

SEQ ID NO: 4504 - protein, 9 aa, Artificial Sequence
  Non-cyclic GFR-binding peptide
MSATSILYY

SEQ ID NO: 4505 - protein, 17 aa, Artificial Sequence
  Non-cyclic GFR-binding peptide
  MOD_RES (3), (4): Xaa is C or S
GPXXTPTKMSPISMLYK

SEQ ID NO: 4506 - protein, 14 aa, Artificial Sequence
  Non-cyclic GFR-binding peptide
  MOD_RES (1), (1): Xaa is C or S
XAPVKTSPISMLYK

SEQ ID NO: 4507 - protein, 20 aa, Artificial Sequence
  Non-cyclic GFR-binding peptide
  MOD_RES (6), (7): Xaa is C or S
GIPEPXXVPEKMEPISILYL

SEQ ID NO: 4508 - protein, 11 aa, Artificial Sequence
  Non-cyclic GFR-binding peptide
QALSPINILYF

SEQ ID NO: 4509 - protein, 19 aa, Artificial Sequence
  Non-cyclic GFR-binding peptide
  MOD_RES (5), (6): Xaa is C or S
TPPTXXVPTRLSPISILYK

SEQ ID NO: 4510 - protein, 20 aa, Artificial Sequence
  Non-cyclic GFR-binding peptide
  MOD_RES (6), (7): Xaa is C or S
ASASPXXVSQDLSPINILYF

SEQ ID NO: 4511 - protein, 16 aa, Artificial Sequence
  Non-cyclic GFR-binding peptide
  MOD_RES (2), (3): Xaa is C or S
PXXVPQDLSPINILYF

SEQ ID NO: 4512 - protein, 19 aa, Artificial Sequence
  Non-cyclic GFR-binding peptide
  MOD_RES (5), (6): Xaa is C or S
APASXXVPARLSATSILYY

SEQ ID NO: 4513 - protein, 18 aa, Artificial Sequence
  Non-cyclic GFR-binding peptide
  MOD_RES (4), (5): Xaa is C or S
AGPXXTPTKMEPISMLYL

SEQ ID NO: 4514 - protein, 13 aa, Artificial Sequence
  Non-cyclic GFR-binding peptide
VPEKMSPISILYK

SEQ ID NO: 4515 - protein, 15 aa, Artificial Sequence
  Non-cyclic GFR-binding peptide
  MOD_RES (1), (2): Xaa is C or S
XXVPEKMSPISILYK

SEQ ID NO: 4516 - protein, 12 aa, Artificial Sequence
  Non-cyclic GFR-binding peptide
PTRLSPISILYK

SEQ ID NO: 4517 - protein, 13 aa, Artificial Sequence
  Non-cyclic GFR-binding peptide
VPEKMNAISILYF

SEQ ID NO: 4518 - protein, 10 aa, Artificial Sequence
  Non-cyclic GFR-binding peptide
KLSATSILYY

SEQ ID NO: 4519 - protein, 20 aa, Artificial Sequence
  Non-cyclic GFR-binding peptide
  MOD_RES (6), (7): Xaa is C or S
STPPTXXVPTRLSATSILYY

SEQ ID NO: 4520 - protein, 20 aa, Artificial Sequence
  Non-cyclic GFR-binding peptide
  MOD_RES (6), (7): Xaa is C or S
GIPEPXXVPEKMSPINILYF

SEQ ID NO: 4521 - protein, 19 aa, Artificial Sequence
  Non-cyclic GFR-binding peptide
  MOD_RES (5), (6): Xaa is C or S
VPSTXXAPVKTEPISMLYL

SEQ ID NO: 4522 - protein, 20 aa, Artificial Sequence
  Non-cyclic GFR-binding peptide
  MOD_RES (6), (7): Xaa is C or S
RVPSTXXAPVKTSPISMLYK

SEQ ID NO: 4523 - protein, 12 aa, Artificial Sequence
  Non-cyclic GFR-binding peptide
PTKMSATSMLYY

SEQ ID NO: 4524 - protein, 12 aa, Artificial Sequence
  Non-cyclic GFR-binding peptide
PEKMSPISILYK

SEQ ID NO: 4525 - protein, 14 aa, Artificial Sequence
  Non-cyclic GFR-binding peptide
  MOD_RES (1), (1): Xaa is C or S
XVPEKMSPISILYK

SEQ ID NO: 4526 - protein, 17 aa, Artificial Sequence
  Non-cyclic GFR-binding peptide
  MOD_RES (3), (4): Xaa is C or S
EPXXVPEKMSPINILYF

SEQ ID NO: 4527 - protein, 18 aa, Artificial Sequence
  Non-cyclic GFR-binding peptide
  MOD_RES (4), (5): Xaa is C or S
PEPXXVPEKMNAISILYF

SEQ ID NO: 4528 - protein, 15 aa, Artificial Sequence
  Non-cyclic GFR-binding peptide
  MOD_RES (1), (2): Xaa is C or S
XXVPTRLSPISILYK

SEQ ID NO: 4529 - protein, 12 aa, Artificial Sequence
  Non-cyclic GFR-binding peptide
PQALSPINILYF

SEQ ID NO: 4530 - protein, 9 aa, Artificial Sequence
  Non-cyclic GFR-binding peptide
MEPISMLYL

SEQ ID NO: 4531 - protein, 20 aa, Artificial Sequence
  Non-cyclic GFR-binding peptide
  MOD_RES (6), (7): Xaa is C or S
GSAGPXXTPTKMSATSMLYY

SEQ ID NO: 4532 - protein, 16 aa, Artificial Sequence
  Non-cyclic GFR-binding peptide
  MOD_RES (2), (3): Xaa is C or S
PXXVPEKMSPINILYF

SEQ ID NO: 4533 - protein, 11 aa, Artificial Sequence
  Non-cyclic GFR-binding peptide
QDLSPINILYF

SEQ ID NO: 4534 - protein, 13 aa, Artificial Sequence
  Non-cyclic GFR-binding peptide
VPTRLSPISILYK

SEQ ID NO: 4535 - protein, 19 aa, Artificial Sequence
  Non-cyclic GFR-binding peptide
  MOD_RES (5), (6): Xaa is C or S
ASKAXXVPTKLSATSILYY

SEQ ID NO: 4536 - protein, 12 aa, Artificial Sequence
  Non-cyclic GFR-binding peptide
SQDLSPINILYF

SEQ ID NO: 4537 - protein, 13 aa, Artificial Sequence
  Non-cyclic GFR-binding peptide
APVKTSPISMLYK

SEQ ID NO: 4538 - protein, 20 aa, Artificial Sequence
  Non-cyclic GFR-binding peptide
  MOD_RES (6), (7): Xaa is C or S
ASAAPXXVPQALSPINILYF

SEQ ID NO: 4539 - protein, 11 aa, Artificial Sequence
  Non-cyclic GFR-binding peptide
TRLSPISILYK

SEQ ID NO: 4540 - protein, 17 aa, Artificial Sequence
  Non-cyclic GFR-binding peptide
  MOD_RES (3), (4): Xaa is C or S
PTXXVPTRLSPISILYK

SEQ ID NO: 4541 - protein, 19 aa, Artificial Sequence
  Non-cyclic GFR-binding peptide
  MOD_RES (5), (6): Xaa is C or S
SAGPXXTPTKMSPISMLYK

SEQ ID NO: 4542 - protein, 9 aa, Artificial Sequence
  Non-cyclic GFR-binding peptide
MSATSMLYY

SEQ ID NO: 4543 - protein, 16 aa, Artificial Sequence
  Non-cyclic GFR-binding peptide
  MOD_RES (2), (3): Xaa is C or S
PXXVPEKMEPISILYL

SEQ ID NO: 4544 - protein, 19 aa, Artificial Sequence
  Non-cyclic GFR-binding peptide
  MOD_RES (5), (6): Xaa is C or S
IPEPXXVPEKMSPINILYF

SEQ ID NO: 4545 - protein, 15 aa, Artificial Sequence
  Non-cyclic GFR-binding peptide
  MOD_RES (1), (2): Xaa is C or S
XXTPTKMSATSMLYY

SEQ ID NO: 4546 - protein, 20 aa, Artificial Sequence
  Non-cyclic GFR-binding peptide
  MOD_RES (6), (7): Xaa is C or S
GSAGPXXTPTKMEPISMLYL

SEQ ID NO: 4547 - protein, 11 aa, Artificial Sequence
  Non-cyclic GFR-binding peptide
TKMEPISMLYL

SEQ ID NO: 4548 - protein, 15 aa, Artificial Sequence
  Non-cyclic GFR-binding peptide
  MOD_RES (1), (2): Xaa is C or S
XXVPQALSPINILYF

SEQ ID NO: 4549 - protein, 18 aa, Artificial Sequence
  Non-cyclic GFR-binding peptide
  MOD_RES (4), (5): Xaa is C or S
ASPXXVPQDLSPINILYF

SEQ ID NO: 4550 - protein, 18 aa, Artificial Sequence
  Non-cyclic GFR-binding peptide
  MOD_RES (4), (5): Xaa is C or S
PSTXXAPVKTSATSMLYY

SEQ ID NO: 4551 - protein, 13 aa, Artificial Sequence
  Non-cyclic GFR-binding peptide
VPEKMEPISILYL

SEQ ID NO: 4552 - protein, 18 aa, Artificial Sequence
  Non-cyclic GFR-binding peptide
  MOD_RES (4), (5): Xaa is C or S
PASXXVPARLSATSILYY

SEQ ID NO: 4553 - protein, 20 aa, Artificial Sequence
  Non-cyclic GFR-binding peptide
  MOD_RES (6), (7): Xaa is C or S
HVPKPXXAPTKLSATSVLYY

SEQ ID NO: 4554 - protein, 9 aa, Artificial Sequence
  Non-cyclic GFR-binding peptide
MSPINILYF

SEQ ID NO: 4555 - protein, 18 aa, Artificial Sequence
  Non-cyclic GFR-binding peptide
  MOD_RES (4), (5): Xaa is C or S
AAPXXVPQALSPINILYF

SEQ ID NO: 4556 - protein, 15 aa, Artificial Sequence
  Non-cyclic GFR-binding peptide
  MOD_RES (1), (2): Xaa is C or S
XXVPEKMSPINILYF

SEQ ID NO: 4557 - protein, 16 aa, Artificial Sequence
  Non-cyclic GFR-binding peptide
  MOD_RES (2), (3): Xaa is C or S
AXXVPTKLSATSILYY

SEQ ID NO: 4558 - protein, 19 aa, Artificial Sequence
  Non-cyclic GFR-binding peptide
  MOD_RES (5), (6): Xaa is C or S
SAGPXXTPTKMSATSMLYY

SEQ ID NO: 4559 - protein, 12 aa, Artificial Sequence
  Non-cyclic GFR-binding peptide
PEKMSATSILYY

SEQ ID NO: 4560 - protein, 11 aa, Artificial Sequence
  Non-cyclic GFR-binding peptide
EKMSPINILYF

SEQ ID NO: 4561 - protein, 11 aa, Artificial Sequence
  Non-cyclic GFR-binding peptide
TRLSATSILYY

SEQ ID NO: 4562 - protein, 20 aa, Artificial Sequence
  Non-cyclic GFR-binding peptide
  MOD_RES (6), (7): Xaa is C or S
GIPEPXXVPEKMSPISILYK

SEQ ID NO: 4563 - protein, 10 aa, Artificial Sequence
  Non-cyclic GFR-binding peptide
RLSATSILYY

SEQ ID NO: 4564 - protein, 15 aa, Artificial Sequence
  Non-cyclic GFR-binding peptide
  MOD_RES (1), (2): Xaa is C or S
XXVSQDLSPINILYF

SEQ ID NO: 4565 - protein, 9 aa, Artificial Sequence
  Non-cyclic GFR-binding peptide
MSPISMLYK

SEQ ID NO: 4566 - protein, 9 aa, Artificial Sequence
  Non-cyclic GFR-binding peptide
TSATSMLYY

SEQ ID NO: 4567 - protein, 16 aa, Artificial Sequence
  Non-cyclic GFR-binding peptide
  MOD_RES (2), (3): Xaa is C or S
PXXVPQALSPINILYF

SEQ ID NO: 4568 - protein, 11 aa, Artificial Sequence
  Non-cyclic GFR-binding peptide
VKTSPISMLYK

SEQ ID NO: 4569 - protein, 12 aa, Artificial Sequence
  Non-cyclic GFR-binding peptide
PEKMEPISILYL

SEQ ID NO: 4570 - protein, 18 aa, Artificial Sequence
  Non-cyclic GFR-binding peptide
  MOD_RES (4), (5): Xaa is C or S
PSTXXAPVKTSPISMLYK

SEQ ID NO: 4571 - protein, 10 aa, Artificial Sequence
  Non-cyclic GFR-binding peptide
KMSPINILYF

SEQ ID NO: 4572 - protein, 11 aa, Artificial Sequence
  Non-cyclic GFR-binding peptide
TKMSATSMLYY

SEQ ID NO: 4573 - protein, 20 aa, Artificial Sequence
  Non-cyclic GFR-binding peptide
  MOD_RES (6), (7): Xaa is C or S
RVPSTXXAPVKTEPISMLYL

SEQ ID NO: 4574 - protein, 14 aa, Artificial Sequence
  Non-cyclic GFR-binding peptide
  MOD_RES (1), (1): Xaa is C or S
XTPTKMSATSMLYY

SEQ ID NO: 4575 - protein, 12 aa, Artificial Sequence
  Non-cyclic GFR-binding peptide
PTKLSATSILYY

SEQ ID NO: 4576 - protein, 16 aa, Artificial Sequence
  Non-cyclic GFR-binding peptide
  MOD_RES (2), (3): Xaa is C or S
TXXAPVKTSATSMLYY

SEQ ID NO: 4577 - protein, 15 aa, Artificial Sequence
  Non-cyclic GFR-binding peptide
  MOD_RES (1), (2): Xaa is C or S
XXTPTKMSPISMLYK

SEQ ID NO: 4578 - protein, 16 aa, Artificial Sequence
  Non-cyclic GFR-binding peptide
  MOD_RES (2), (3): Xaa is C or S
PXXVSQDLSPINILYF

SEQ ID NO: 4579 - protein, 17 aa, Artificial Sequence
  Non-cyclic GFR-binding peptide
  MOD_RES (3), (4): Xaa is C or S
STXXAPVKTSATSMLYY

SEQ ID NO: 4580 - protein, 13 aa, Artificial Sequence
  Non-cyclic GFR-binding peptide
VPEKMSATSILYY

SEQ ID NO: 4581 - protein, 19 aa, Artificial Sequence
  Non-cyclic GFR-binding peptide
  MOD_RES (5), (6): Xaa is C or S
SAGPXXTPTKMEPISMLYL

SEQ ID NO: 4582 - protein, 12 aa, Artificial Sequence
  Non-cyclic GFR-binding peptide
PEKMNAISILYF

SEQ ID NO: 4583 - protein, 13 aa, Artificial Sequence
  Non-cyclic GFR-binding peptide
APVKTEPISMLYL

SEQ ID NO: 4584 - protein, 16 aa, Artificial Sequence
  Non-cyclic GFR-binding peptide
  MOD_RES (2), (3): Xaa is C or S
TXXAPVKTSPISMLYK

SEQ ID NO: 4585 - protein, 17 aa, Artificial Sequence
  Non-cyclic GFR-binding peptide
  MOD_RES (3), (4): Xaa is C or S
SPXXVSQDLSPINILYF

SEQ ID NO: 4586 - protein, 9 aa, Artificial Sequence
  Non-cyclic GFR-binding peptide
TSPISMLYK

SEQ ID NO: 4587 - protein, 20 aa, Artificial Sequence
  Non-cyclic GFR-binding peptide
  MOD_RES (6), (7): Xaa is C or S
ASASPXXVPQDLSPINILYF

SEQ ID NO: 4588 - protein, 11 aa, Artificial Sequence
  Non-cyclic GFR-binding peptide
ARLSATSILYY

SEQ ID NO: 4589 - protein, 13 aa, Artificial Sequence
  Non-cyclic GFR-binding peptide
VPTKLSATSILYY

SEQ ID NO: 4590 - protein, 19 aa, Artificial Sequence
  Non-cyclic GFR-binding peptide
  MOD_RES (5), (6): Xaa is C or S
SAAPXXVPQALSPINILYF

SEQ ID NO: 4591 - protein, 17 aa, Artificial Sequence
  Non-cyclic GFR-binding peptide
  MOD_RES (3), (4): Xaa is C or S
STXXAPVKTSPISMLYK

SEQ ID NO: 4592 - protein, 15 aa, Artificial Sequence
  Non-cyclic GFR-binding peptide
  MOD_RES (1), (2): Xaa is C or S
XXVPTRLEPISILYL

SEQ ID NO: 4593 - protein, 14 aa, Artificial Sequence
  Non-cyclic GFR-binding peptide
  MOD_RES (1), (1): Xaa is C or S
XTPTKMSPISMLYK

SEQ ID NO: 4594 - protein, 14 aa, Artificial Sequence
  Non-cyclic GFR-binding peptide
  MOD_RES (1), (1): Xaa is C or S
XVPEKMSPINILYF

SEQ ID NO: 4595 - protein, 19 aa, Artificial Sequence
  Non-cyclic GFR-binding peptide
  MOD_RES (14), (15): Xaa is C or S
MIQITINSLRTPVXXTPPT

SEQ ID NO: 4596 - protein, 14 aa, Artificial Sequence
  Non-cyclic GFR-binding peptide
  MOD_RES (14), (14): Xaa is C or S
MIQMTINSMKTPTX

SEQ ID NO: 4597 - protein, 9 aa, Artificial Sequence
  Non-cyclic GFR-binding peptide
MIQMTINST

SEQ ID NO: 4598 - protein, 16 aa, Artificial Sequence
  Non-cyclic GFR-binding peptide
  MOD_RES (14), (15): Xaa is C or S
MIQMTINSTKVPAXXT

SEQ ID NO: 4599 - protein, 12 aa, Artificial Sequence
  Non-cyclic GFR-binding peptide
MIQITINSLRAP

SEQ ID NO: 4600 - protein, 10 aa, Artificial Sequence
  Non-cyclic GFR-binding peptide
MIQITINSLR

SEQ ID NO: 4601 - protein, 11 aa, Artificial Sequence
  Non-cyclic GFR-binding peptide
MIQITINSLRA

SEQ ID NO: 4602 - protein, 13 aa, Artificial Sequence
  Non-cyclic GFR-binding peptide
MIQMTINSTKVPA

SEQ ID NO: 4603 - protein, 18 aa, Artificial Sequence
  Non-cyclic GFR-binding peptide
  MOD_RES (14), (15): Xaa is C or S
MIQMTINSMKTPTXXPGA

SEQ ID NO: 4604 - protein, 16 aa, Artificial Sequence
  Non-cyclic GFR-binding peptide
  MOD_RES (14), (15): Xaa is C or S
MIQMTINSMKTPTXXP

SEQ ID NO: 4605 - protein, 15 aa, Artificial Sequence
  Non-cyclic GFR-binding peptide
  MOD_RES (14), (15): Xaa is C or S
MIQITINSLRAPVXX

SEQ ID NO: 4606 - protein, 13 aa, Artificial Sequence
  Non-cyclic GFR-binding peptide
MIQITINSLRTPV

SEQ ID NO: 4607 - protein, 15 aa, Artificial Sequence
  Non-cyclic GFR-binding peptide
  MOD_RES (14), (15): Xaa is C or S
MIQMTINSMKTPTXX

SEQ ID NO: 4608 - protein, 16 aa, Artificial Sequence
  Non-cyclic GFR-binding peptide
  MOD_RES (14), (15): Xaa is C or S
MIQITINSLRAPVXXS

SEQ ID NO: 4609 - protein, 15 aa, Artificial Sequence
  Non-cyclic GFR-binding peptide
  MOD_RES (14), (15): Xaa is C or S
MIQMTINSTKVPAXX

SEQ ID NO: 4610 - protein, 16 aa, Artificial Sequence
  Non-cyclic GFR-binding peptide
  MOD_RES (14), (15): Xaa is C or S
MIQITINSLRTPVXXT

SEQ ID NO: 4611 - protein, 15 aa, Artificial Sequence
  Non-cyclic GFR-binding peptide
  MOD_RES (14), (15): Xaa is C or S
MIQITINSLRTPVXX

SEQ ID NO: 4612 - protein, 18 aa, Artificial Sequence
  Non-cyclic GFR-binding peptide
  MOD_RES (14), (15): Xaa is C or S
MIQITINSLRTPVXXTPP

SEQ ID NO: 4613 - protein, 10 aa, Artificial Sequence
  Non-cyclic GFR-binding peptide
MIQMTINSMK

SEQ ID NO: 4614 - protein, 17 aa, Artificial Sequence
  Non-cyclic GFR-binding peptide
  MOD_RES (14), (15): Xaa is C or S
MIQMTINSMKTPTXXPG

SEQ ID NO: 4615 - protein, 13 aa, Artificial Sequence
  Non-cyclic GFR-binding peptide
MIQMTINSMKTPT

SEQ ID NO: 4616 - protein, 19 aa, Artificial Sequence
  Non-cyclic GFR-binding peptide
  MOD_RES (14), (15): Xaa is C or S
MIQMTINSTKVPAXXTSPV

SEQ ID NO: 4617 - protein, 10 aa, Artificial Sequence
  Non-cyclic GFR-binding peptide
MIQMTINSTK

SEQ ID NO: 4618 - protein, 11 aa, Artificial Sequence
  Non-cyclic GFR-binding peptide
MIQMTINSTKV

SEQ ID NO: 4619 - protein, 17 aa, Artificial Sequence
  Non-cyclic GFR-binding peptide
  MOD_RES (14), (15): Xaa is C or S
MIQITINSLRAPVXXSA

SEQ ID NO: 4620 - protein, 18 aa, Artificial Sequence
  Non-cyclic GFR-binding peptide
  MOD_RES (14), (15): Xaa is C or S
MIQMTINSTKVPAXXTSP

SEQ ID NO: 4621 - protein, 17 aa, Artificial Sequence
  Non-cyclic GFR-binding peptide
  MOD_RES (14), (15): Xaa is C or S
MIQMTINSTKVPAXXTS

SEQ ID NO: 4622 - protein, 20 aa, Artificial Sequence
  Non-cyclic GFR-binding peptide
  MOD_RES (14), (15): Xaa is C or S
MIQMTINSTKVPAXXTSPVR

SEQ ID NO: 4623 - protein, 14 aa, Artificial Sequence
  Non-cyclic GFR-binding peptide
  MOD_RES (14), (14): Xaa is C or S
MIQITINSLRTPVX

SEQ ID NO: 4624 - protein, 20 aa, Artificial Sequence
  Non-cyclic GFR-binding peptide
  MOD_RES (14), (15): Xaa is C or S
MIQMTINSMKTPTXXPGASG

SEQ ID NO: 4625 - protein, 12 aa, Artificial Sequence
  Non-cyclic GFR-binding peptide
MIQMTINSTKVP

SEQ ID NO: 4626 - protein, 12 aa, Artificial Sequence
  Non-cyclic GFR-binding peptide
MIQITINSLRTP

SEQ ID NO: 4627 - protein, 19 aa, Artificial Sequence
  Non-cyclic GFR-binding peptide
  MOD_RES (14), (15): Xaa is C or S
MIQITINSLRAPVXXSAPA

SEQ ID NO: 4628 - protein, 13 aa, Artificial Sequence
  Non-cyclic GFR-binding peptide
MIQITINSLRAPV

SEQ ID NO: 4629 - protein, 20 aa, Artificial Sequence
  Non-cyclic GFR-binding peptide
  MOD_RES (14), (15): Xaa is C or S
MIQVTINSLKTPAXXPKPVH

SEQ ID NO: 4630 - protein, 17 aa, Artificial Sequence
  Non-cyclic GFR-binding peptide
  MOD_RES (14), (15): Xaa is C or S
MIQITINSLRTPVXXTP

SEQ ID NO: 4631 - protein, 9 aa, Artificial Sequence
  Non-cyclic GFR-binding peptide
MIQMTINSM

SEQ ID NO: 4632 - protein, 12 aa, Artificial Sequence
  Non-cyclic GFR-binding peptide
MIQMTINSMKTP

SEQ ID NO: 4633 - protein, 20 aa, Artificial Sequence
  Non-cyclic GFR-binding peptide
  MOD_RES (14), (15): Xaa is C or S
MIQITINSLRTPVXXTPPTS

SEQ ID NO: 4634 - protein, 14 aa, Artificial Sequence
  Non-cyclic GFR-binding peptide
  MOD_RES (14), (14): Xaa is C or S
MIQITINSLRAPVX

SEQ ID NO: 4635 - protein, 18 aa, Artificial Sequence
  Non-cyclic GFR-binding peptide
  MOD_RES (14), (15): Xaa is C or S
MIQITINSLRAPVXXSAP

SEQ ID NO: 4636 - protein, 19 aa, Artificial Sequence
  Non-cyclic GFR-binding peptide
  MOD_RES (14), (15): Xaa is C or S
MIQMTINSMKTPTXXPGAS

SEQ ID NO: 4637 - protein, 11 aa, Artificial Sequence
  Non-cyclic GFR-binding peptide
MIQMTINSMKT

SEQ ID NO: 4638 - protein, 14 aa, Artificial Sequence
  Non-cyclic GFR-binding peptide
  MOD_RES (14), (14): Xaa is C or S
MIQMTINSTKVPAX

SEQ ID NO: 4639 - protein, 20 aa, Artificial Sequence
  Non-cyclic GFR-binding peptide
  MOD_RES (14), (15): Xaa is C or S
MIQITINSLRAPVXXSAPAA

SEQ ID NO: 4640 - protein, 11 aa, Artificial Sequence
  Non-cyclic GFR-binding peptide
MIQITINSLRT

SEQ ID NO: 4641 - protein, 19 aa, Artificial Sequence
  Non-cyclic GFR-binding peptide
  MOD_RES (5), (6): Xaa is C or S
TPPTXXVPTRLSNITIQIM

SEQ ID NO: 4642 - protein, 14 aa, Artificial Sequence
  Non-cyclic GFR-binding peptide
  MOD_RES (1), (1): Xaa is C or S
XTPTKMSNITMQIM

SEQ ID NO: 4643 - protein, 9 aa, Artificial Sequence
  Non-cyclic GFR-binding peptide
TSNITMQIM

SEQ ID NO: 4644 - protein, 16 aa, Artificial Sequence
  Non-cyclic GFR-binding peptide
  MOD_RES (2), (3): Xaa is C or S
TXXAPVKTSNITMQIM

SEQ ID NO: 4645 - protein, 12 aa, Artificial Sequence
  Non-cyclic GFR-binding peptide
PARLSNITIQIM

SEQ ID NO: 4646 - protein, 10 aa, Artificial Sequence
  Non-cyclic GFR-binding peptide
RLSNITIQIM

SEQ ID NO: 4647 - protein, 11 aa, Artificial Sequence
  Non-cyclic GFR-binding peptide
ARLSNITIQIM

SEQ ID NO: 4648 - protein, 13 aa, Artificial Sequence
  Non-cyclic GFR-binding peptide
APVKTSNITMQIM

SEQ ID NO: 4649 - protein, 18 aa, Artificial Sequence
  Non-cyclic GFR-binding peptide
  MOD_RES (4), (5): Xaa is C or S
AGPXXTPTKMSNITMQIM

SEQ ID NO: 4650 - protein, 16 aa, Artificial Sequence
  Non-cyclic GFR-binding peptide
  MOD_RES (2), (3): Xaa is C or S
PXXTPTKMSNITMQIM

SEQ ID NO: 4651 - protein, 15 aa, Artificial Sequence
  Non-cyclic GFR-binding peptide
  MOD_RES (1), (2): Xaa is C or S
XXVPARLSNITIQIM

SEQ ID NO: 4652 - protein, 13 aa, Artificial Sequence
  Non-cyclic GFR-binding peptide
VPTRLSNITIQIM

SEQ ID NO: 4653 - protein, 15 aa, Artificial Sequence
  Non-cyclic GFR-binding peptide
  MOD_RES (1), (2): Xaa is C or S
XXTPTKMSNITMQIM

SEQ ID NO: 4654 - protein, 16 aa, Artificial Sequence
  Non-cyclic GFR-binding peptide
  MOD_RES (2), (3): Xaa is C or S
SXXVPARLSNITIQIM

SEQ ID NO: 4655 - protein, 15 aa, Artificial Sequence
  Non-cyclic GFR-binding peptide
  MOD_RES (1), (2): Xaa is C or S
XXAPVKTSNITMQIM

SEQ ID NO: 4656 - protein, 16 aa, Artificial Sequence
  Non-cyclic GFR-binding peptide
  MOD_RES (2), (3): Xaa is C or S
TXXVPTRLSNITIQIM

SEQ ID NO: 4657 - protein, 15 aa, Artificial Sequence
  Non-cyclic GFR-binding peptide
  MOD_RES (1), (2): Xaa is C or S
XXVPTRLSNITIQIM

SEQ ID NO: 4658 - protein, 18 aa, Artificial Sequence
  Non-cyclic GFR-binding peptide
  MOD_RES (4), (5): Xaa is C or S
PPTXXVPTRLSNITIQIM

SEQ ID NO: 4659 - protein, 10 aa, Artificial Sequence
  Non-cyclic GFR-binding peptide
KMSNITMQIM

SEQ ID NO: 4660 - protein, 17 aa, Artificial Sequence
  Non-cyclic GFR-binding peptide
  MOD_RES (3), (4): Xaa is C or S
GPXXTPTKMSNITMQIM

SEQ ID NO: 4661 - protein, 13 aa, Artificial Sequence
  Non-cyclic GFR-binding peptide
TPTKMSNITMQIM

SEQ ID NO: 4662 - protein, 19 aa, Artificial Sequence
  Non-cyclic GFR-binding peptide
  MOD_RES (5), (6): Xaa is C or S
VPSTXXAPVKTSNITMQIM

SEQ ID NO: 4663 - protein, 10 aa, Artificial Sequence
  Non-cyclic GFR-binding peptide
KTSNITMQIM

SEQ ID NO: 4664 - protein, 11 aa, Artificial Sequence
  Non-cyclic GFR-binding peptide
VKTSNITMQIM

SEQ ID NO: 4665 - protein, 17 aa, Artificial Sequence
  Non-cyclic GFR-binding peptide
  MOD_RES (3), (4): Xaa is C or S
ASXXVPARLSNITIQIM

SEQ ID NO: 4666 - protein, 18 aa, Artificial Sequence
  Non-cyclic GFR-binding peptide
  MOD_RES (4), (5): Xaa is C or S
PSTXXAPVKTSNITMQIM

SEQ ID NO: 4667 - protein, 17 aa, Artificial Sequence
  Non-cyclic GFR-binding peptide
  MOD_RES (3), (4): Xaa is C or S
STXXAPVKTSNITMQIM

SEQ ID NO: 4668 - protein, 20 aa, Artificial Sequence
  Non-cyclic GFR-binding peptide
  MOD_RES (6), (7): Xaa is C or S
RVPSTXXAPVKTSNITMQIM

SEQ ID NO: 4669 - protein, 14 aa, Artificial Sequence
  Non-cyclic GFR-binding peptide
  MOD_RES (1), (1): Xaa is C or S
XVPTRLSNITIQIM

SEQ ID NO: 4670 - protein, 20 aa, Artificial Sequence
  Non-cyclic GFR-binding peptide
  MOD_RES (6), (7): Xaa is C or S
GSAGPXXTPTKMSNITMQIM

SEQ ID NO: 4671 - protein, 12 aa, Artificial Sequence
  Non-cyclic GFR-binding peptide
PVKTSNITMQIM

SEQ ID NO: 4672 - protein, 12 aa, Artificial Sequence
  Non-cyclic GFR-binding peptide
PTRLSNITIQIM

SEQ ID NO: 4673 - protein, 19 aa, Artificial Sequence
  Non-cyclic GFR-binding peptide
  MOD_RES (5), (6): Xaa is C or S
APASXXVPARLSNITIQIM

SEQ ID NO: 4674 - protein, 13 aa, Artificial Sequence
  Non-cyclic GFR-binding peptide
VPARLSNITIQIM

SEQ ID NO: 4675 - protein, 20 aa, Artificial Sequence
  Non-cyclic GFR-binding peptide
  MOD_RES (6), (7): Xaa is C or S
HVPKPXXAPTKLSNITVQIM

SEQ ID NO: 4676 - protein, 17 aa, Artificial Sequence
  Non-cyclic GFR-binding peptide
  MOD_RES (3), (4): Xaa is C or S
PTXXVPTRLSNITIQIM

SEQ ID NO: 4677 - protein, 9 aa, Artificial Sequence
  Non-cyclic GFR-binding peptide
MSNITMQIM

SEQ ID NO: 4678 - protein, 12 aa, Artificial Sequence
  Non-cyclic GFR-binding peptide
PTKMSNITMQIM

SEQ ID NO: 4679 - protein, 20 aa, Artificial Sequence
  Non-cyclic GFR-binding peptide
  MOD_RES (6), (7): Xaa is C or S
STPPTXXVPTRLSNITIQIM

SEQ ID NO: 4680 - protein, 14 aa, Artificial Sequence
  Non-cyclic GFR-binding peptide
  MOD_RES (1), (1): Xaa is C or S
XVPARLSNITIQIM

SEQ ID NO: 4681 - protein, 18 aa, Artificial Sequence
  Non-cyclic GFR-binding peptide
  MOD_RES (4), (5): Xaa is C or S
PASXXVPARLSNITIQIM

SEQ ID NO: 4682 - protein, 19 aa, Artificial Sequence
  Non-cyclic GFR-binding peptide
  MOD_RES (5), (6): Xaa is C or S
SAGPXXTPTKMSNITMQIM

SEQ ID NO: 4683 - protein, 11 aa, Artificial Sequence
  Non-cyclic GFR-binding peptide
TKMSNITMQIM

SEQ ID NO: 4684 - protein, 14 aa, Artificial Sequence
  Non-cyclic GFR-binding peptide
  MOD_RES (1), (1): Xaa is C or S
XAPVKTSNITMQIM

SEQ ID NO: 4685 - protein, 20 aa, Artificial Sequence
  Non-cyclic GFR-binding peptide
  MOD_RES (6), (7): Xaa is C or S
AAPASXXVPARLSNITIQIM

SEQ ID NO: 4686 - protein, 11 aa, Artificial Sequence
  Non-cyclic GFR-binding peptide
TRLSNITIQIM

SEQ ID NO: 4687 - protein, 16 aa, Artificial Sequence
  Non-cyclic GFR-binding peptide
  MOD_RES (14), (15): Xaa is C or S
LYLMSIASMKTPTXXP

SEQ ID NO: 4688 - protein, 13 aa, Artificial Sequence
  Non-cyclic GFR-binding peptide
LYLISIASLKTPV

SEQ ID NO: 4689 - protein, 15 aa, Artificial Sequence
  Non-cyclic GFR-binding peptide
  MOD_RES (14), (15): Xaa is C or S
LYLISIASLRAPVXX

SEQ ID NO: 4690 - protein, 19 aa, Artificial Sequence
  Non-cyclic GFR-binding peptide
  MOD_RES (14), (15): Xaa is C or S
LYLISIASMKEPVXXPEPI

SEQ ID NO: 4691 - protein, 14 aa, Artificial Sequence
  Non-cyclic GFR-binding peptide
  MOD_RES (14), (14): Xaa is C or S
LYLISIASMKEPVX

SEQ ID NO: 4692 - protein, 18 aa, Artificial Sequence
  Non-cyclic GFR-binding peptide
  MOD_RES (14), (15): Xaa is C or S
LYLISIASLRAPVXXSAP

SEQ ID NO: 4693 - protein, 18 aa, Artificial Sequence
  Non-cyclic GFR-binding peptide
  MOD_RES (14), (15): Xaa is C or S
LYLISIASMKEPVXXPEP

SEQ ID NO: 4694 - protein, 18 aa, Artificial Sequence
  Non-cyclic GFR-binding peptide
  MOD_RES (14), (15): Xaa is C or S
LYLMSIASMKTPTXXPGA

SEQ ID NO: 4695 - protein, 14 aa, Artificial Sequence
  Non-cyclic GFR-binding peptide
  MOD_RES (14), (14): Xaa is C or S
LYLMSIASTKVPAX

SEQ ID NO: 4696 - protein, 10 aa, Artificial Sequence
  Non-cyclic GFR-binding peptide
LYLISIASLK

SEQ ID NO: 4697 - protein, 9 aa, Artificial Sequence
  Non-cyclic GFR-binding peptide
LYLMSIASM

SEQ ID NO: 4698 - protein, 20 aa, Artificial Sequence
  Non-cyclic GFR-binding peptide
  MOD_RES (14), (15): Xaa is C or S
LYLMSIASTKVPAXXTSPVR

SEQ ID NO: 4699 - protein, 12 aa, Artificial Sequence
  Non-cyclic GFR-binding peptide
LYLISIASMKEP

SEQ ID NO: 4700 - protein, 13 aa, Artificial Sequence
  Non-cyclic GFR-binding peptide
LYLISIASLRAPV

SEQ ID NO: 4701 - protein, 20 aa, Artificial Sequence
  Non-cyclic GFR-binding peptide
  MOD_RES (14), (15): Xaa is C or S
LYLVSIASLKTPAXXPKPVH

SEQ ID NO: 4702 - protein, 20 aa, Artificial Sequence
  Non-cyclic GFR-binding peptide
  MOD_RES (14), (15): Xaa is C or S
LYLMSIASMKTPTXXPGASG

SEQ ID NO: 4703 - protein, 16 aa, Artificial Sequence
  Non-cyclic GFR-binding peptide
  MOD_RES (14), (15): Xaa is C or S
LYLISIASLKTPVXXA

SEQ ID NO: 4704 - protein, 15 aa, Artificial Sequence
  Non-cyclic GFR-binding peptide
  MOD_RES (14), (15): Xaa is C or S
LYLISIASMKEPVXX

SEQ ID NO: 4705 - protein, 11 aa, Artificial Sequence
  Non-cyclic GFR-binding peptide
LYLMSIASTKV

SEQ ID NO: 4706 - protein, 19 aa, Artificial Sequence
  Non-cyclic GFR-binding peptide
  MOD_RES (14), (15): Xaa is C or S
LYLISIASLRAPVXXSAPA

SEQ ID NO: 4707 - protein, 19 aa, Artificial Sequence
  Non-cyclic GFR-binding peptide
  MOD_RES (14), (15): Xaa is C or S
LYLMSIASTKVPAXXTSPV

SEQ ID NO: 4708 - protein, 13 aa, Artificial Sequence
  Non-cyclic GFR-binding peptide
LYLMSIASMKTPT

SEQ ID NO: 4709 - protein, 17 aa, Artificial Sequence
  Non-cyclic GFR-binding peptide
  MOD_RES (14), (15): Xaa is C or S
LYLMSIASMKTPTXXPG

SEQ ID NO: 4710 - protein, 12 aa, Artificial Sequence
  Non-cyclic GFR-binding peptide
LYLISIASLKTP

SEQ ID NO: 4711 - protein, 13 aa, Artificial Sequence
  Non-cyclic GFR-binding peptide
LYLISIASMKEPV

SEQ ID NO: 4712 - protein, 10 aa, Artificial Sequence
  Non-cyclic GFR-binding peptide
LYLMSIASTK

SEQ ID NO: 4713 - protein, 15 aa, Artificial Sequence
  Non-cyclic GFR-binding peptide
  MOD_RES (14), (15): Xaa is C or S
LYLMSIASMKTPTXX

SEQ ID NO: 4714 - protein, 9 aa, Artificial Sequence
  Non-cyclic GFR-binding peptide
LYLISIASM

SEQ ID NO: 4715 - protein, 14 aa, Artificial Sequence
  Non-cyclic GFR-binding peptide
  MOD_RES (14), (14): Xaa is C or S
LYLISIASLKTPVX

SEQ ID NO: 4716 - protein, 10 aa, Artificial Sequence
  Non-cyclic GFR-binding peptide
LYLISIASMK

SEQ ID NO: 4717 - protein, 20 aa, Artificial Sequence
  Non-cyclic GFR-binding peptide
  MOD_RES (14), (15): Xaa is C or S
LYLISIASMKEPVXXPEPIG

SEQ ID NO: 4718 - protein, 9 aa, Artificial Sequence
  Non-cyclic GFR-binding peptide
LYLMSIAST

SEQ ID NO: 4719 - protein, 11 aa, Artificial Sequence
  Non-cyclic GFR-binding peptide
LYLISIASLRA

SEQ ID NO: 4720 - protein, 20 aa, Artificial Sequence
  Non-cyclic GFR-binding peptide
  MOD_RES (14), (15): Xaa is C or S
LYLISIASLRAPVXXSAPAA

SEQ ID NO: 4721 - protein, 16 aa, Artificial Sequence
  Non-cyclic GFR-binding peptide
  MOD_RES (14), (15): Xaa is C or S
LYLISIASLRAPVXXS

SEQ ID NO: 4722 - protein, 17 aa, Artificial Sequence
  Non-cyclic GFR-binding peptide
  MOD_RES (14), (15): Xaa is C or S
LYLISIASLKTPVXXAK

SEQ ID NO: 4723 - protein, 14 aa, Artificial Sequence
  Non-cyclic GFR-binding peptide
  MOD_RES (14), (14): Xaa is C or S
LYLMSIASMKTPTX

SEQ ID NO: 4724 - protein, 12 aa, Artificial Sequence
  Non-cyclic GFR-binding peptide
LYLMSIASMKTP

SEQ ID NO: 4725 - protein, 20 aa, Artificial Sequence
  Non-cyclic GFR-binding peptide
  MOD_RES (14), (15): Xaa is C or S
LYLISIASLKTPVXXAKSAK

SEQ ID NO: 4726 - protein, 11 aa, Artificial Sequence
  Non-cyclic GFR-binding peptide
LYLMSIASMKT

SEQ ID NO: 4727 - protein, 17 aa, Artificial Sequence
  Non-cyclic GFR-binding peptide
  MOD_RES (14), (15): Xaa is C or S
LYLISIASLRAPVXXSA

SEQ ID NO: 4728 - protein, 12 aa, Artificial Sequence
  Non-cyclic GFR-binding peptide
LYLISIASLRAP

SEQ ID NO: 4729 - protein, 19 aa, Artificial Sequence
  Non-cyclic GFR-binding peptide
  MOD_RES (14), (15): Xaa is C or S
LYLISIASLKTPVXXAKSA

SEQ ID NO: 4730 - protein, 14 aa, Artificial Sequence
  Non-cyclic GFR-binding peptide
  MOD_RES (14), (14): Xaa is C or S
LYLISIASLRAPVX

SEQ ID NO: 4731 - protein, 19 aa, Artificial Sequence
  Non-cyclic GFR-binding peptide
  MOD_RES (14), (15): Xaa is C or S
LYLMSIASMKTPTXXPGAS

SEQ ID NO: 4732 - protein, 16 aa, Artificial Sequence
  Non-cyclic GFR-binding peptide
  MOD_RES (14), (15): Xaa is C or S
LYLISIASMKEPVXXP

SEQ ID NO: 4733 - protein, 10 aa, Artificial Sequence
  Non-cyclic GFR-binding peptide
LYLMSIASMK

SEQ ID NO: 4734 - protein, 15 aa, Artificial Sequence
  Non-cyclic GFR-binding peptide
  MOD_RES (14), (15): Xaa is C or S
LYLISIASLKTPVXX

SEQ ID NO: 4735 - protein, 11 aa, Artificial Sequence
  Non-cyclic GFR-binding peptide
LYLISIASMKE

SEQ ID NO: 4736 - protein, 17 aa, Artificial Sequence
  Non-cyclic GFR-binding peptide
  MOD_RES (14), (15): Xaa is C or S
LYLMSIASTKVPAXXTS

SEQ ID NO: 4737 - protein, 11 aa, Artificial Sequence
  Non-cyclic GFR-binding peptide
LYLISIASLKT

SEQ ID NO: 4738 - protein, 13 aa, Artificial Sequence
  Non-cyclic GFR-binding peptide
LYLMSIASTKVPA

SEQ ID NO: 4739 - protein, 12 aa, Artificial Sequence
  Non-cyclic GFR-binding peptide
LYLMSIASTKVP

SEQ ID NO: 4740 - protein, 18 aa, Artificial Sequence
  Non-cyclic GFR-binding peptide
  MOD_RES (14), (15): Xaa is C or S
LYLMSIASTKVPAXXTSP

SEQ ID NO: 4741 - protein, 15 aa, Artificial Sequence
  Non-cyclic GFR-binding peptide
  MOD_RES (14), (15): Xaa is C or S
LYLMSIASTKVPAXX

SEQ ID NO: 4742 - protein, 17 aa, Artificial Sequence
  Non-cyclic GFR-binding peptide
  MOD_RES (14), (15): Xaa is C or S
LYLISIASMKEPVXXPE

SEQ ID NO: 4743 - protein, 18 aa, Artificial Sequence
  Non-cyclic GFR-binding peptide
  MOD_RES (14), (15): Xaa is C or S
LYLISIASLKTPVXXAKS

SEQ ID NO: 4744 - protein, 16 aa, Artificial Sequence
  Non-cyclic GFR-binding peptide
  MOD_RES (14), (15): Xaa is C or S
LYLMSIASTKVPAXXT

SEQ ID NO: 4745 - protein, 16 aa, Artificial Sequence
  Non-cyclic GFR-binding peptide
  MOD_RES (2), (3): Xaa is C or S
PXXTPTKMSAISMLYL

SEQ ID NO: 4746 - protein, 13 aa, Artificial Sequence
  Non-cyclic GFR-binding peptide
VPTKLSAISILYL

SEQ ID NO: 4747 - protein, 15 aa, Artificial Sequence
  Non-cyclic GFR-binding peptide
  MOD_RES (1), (2): Xaa is C or S
XXVPARLSAISILYL

SEQ ID NO: 4748 - protein, 19 aa, Artificial Sequence
  Non-cyclic GFR-binding peptide
  MOD_RES (5), (6): Xaa is C or S
IPEPXXVPEKMSAISILYL

SEQ ID NO: 4749 - protein, 14 aa, Artificial Sequence
  Non-cyclic GFR-binding peptide
  MOD_RES (1), (1): Xaa is C or S
XVPEKMSAISILYL

SEQ ID NO: 4750 - protein, 18 aa, Artificial Sequence
  Non-cyclic GFR-binding peptide
  MOD_RES (4), (5): Xaa is C or S
PASXXVPARLSAISILYL

SEQ ID NO: 4751 - protein, 18 aa, Artificial Sequence
  Non-cyclic GFR-binding peptide
  MOD_RES (4), (5): Xaa is C or S
PEPXXVPEKMSAISILYL

SEQ ID NO: 4752 - protein, 18 aa, Artificial Sequence
  Non-cyclic GFR-binding peptide
  MOD_RES (4), (5): Xaa is C or S
AGPXXTPTKMSAISMLYL

SEQ ID NO: 4753 - protein, 14 aa, Artificial Sequence
  Non-cyclic GFR-binding peptide
  MOD_RES (1), (1): Xaa is C or S
XAPVKTSAISMLYL

SEQ ID NO: 4754 - protein, 10 aa, Artificial Sequence
  Non-cyclic GFR-binding peptide
KLSAISILYL

SEQ ID NO: 4755 - protein, 9 aa, Artificial Sequence
  Non-cyclic GFR-binding peptide
MSAISMLYL

SEQ ID NO: 4756 - protein, 20 aa, Artificial Sequence
  Non-cyclic GFR-binding peptide
  MOD_RES (6), (7): Xaa is C or S
RVPSTXXAPVKTSAISMLYL

SEQ ID NO: 4757 - protein, 12 aa, Artificial Sequence
  Non-cyclic GFR-binding peptide
PEKMSAISILYL

SEQ ID NO: 4758 - protein, 13 aa, Artificial Sequence
  Non-cyclic GFR-binding peptide
VPARLSAISILYL

SEQ ID NO: 4759 - protein, 20 aa, Artificial Sequence
  Non-cyclic GFR-binding peptide
  MOD_RES (6), (7): Xaa is C or S
HVPKPXXAPTKLSAISVLYL

SEQ ID NO: 4760 - protein, 20 aa, Artificial Sequence
  Non-cyclic GFR-binding peptide
  MOD_RES (6), (7): Xaa is C or S
GSAGPXXTPTKMSAISMLYL

SEQ ID NO: 4761 - protein, 16 aa, Artificial Sequence
  Non-cyclic GFR-binding peptide
  MOD_RES (2), (3): Xaa is C or S
AXXVPTKLSAISILYL

SEQ ID NO: 4762 - protein, 15 aa, Artificial Sequence
  Non-cyclic GFR-binding peptide
  MOD_RES (1), (2): Xaa is C or S
XXVPEKMSAISILYL

SEQ ID NO: 4763 - protein, 11 aa, Artificial Sequence
  Non-cyclic GFR-binding peptide
VKTSAISMLYL

SEQ ID NO: 4764 - protein, 19 aa, Artificial Sequence
  Non-cyclic GFR-binding peptide
  MOD_RES (5), (6): Xaa is C or S
APASXXVPARLSAISILYL

SEQ ID NO: 4765 - protein, 19 aa, Artificial Sequence
  Non-cyclic GFR-binding peptide
  MOD_RES (5), (6): Xaa is C or S
VPSTXXAPVKTSAISMLYL

SEQ ID NO: 4766 - protein, 13 aa, Artificial Sequence
  Non-cyclic GFR-binding peptide
TPTKMSAISMLYL

SEQ ID NO: 4767 - protein, 17 aa, Artificial Sequence
  Non-cyclic GFR-binding peptide
  MOD_RES (3), (4): Xaa is C or S
GPXXTPTKMSAISMLYL

SEQ ID NO: 4768 - protein, 12 aa, Artificial Sequence
  Non-cyclic GFR-binding peptide
PTKLSAISILYL

SEQ ID NO: 4769 - protein, 13 aa, Artificial Sequence
  Non-cyclic GFR-binding peptide
VPEKMSAISILYL

SEQ ID NO: 4770 - protein, 10 aa, Artificial Sequence
  Non-cyclic GFR-binding peptide
KTSAISMLYL

SEQ ID NO: 4771 - protein, 15 aa, Artificial Sequence
  Non-cyclic GFR-binding peptide
  MOD_RES (1), (2): Xaa is C or S
XXTPTKMSAISMLYL

SEQ ID NO: 4772 - protein, 9 aa, Artificial Sequence
  Non-cyclic GFR-binding peptide
MSAISILYL

SEQ ID NO: 4773 - protein, 14 aa, Artificial Sequence
  Non-cyclic GFR-binding peptide
  MOD_RES (1), (1): Xaa is C or S
XVPTKLSAISILYL

SEQ ID NO: 4774 - protein, 10 aa, Artificial Sequence
  Non-cyclic GFR-binding peptide
KMSAISILYL

SEQ ID NO: 4775 - protein, 20 aa, Artificial Sequence
  Non-cyclic GFR-binding peptide
  MOD_RES (6), (7): Xaa is C or S
GIPEPXXVPEKMSAISILYL

SEQ ID NO: 4776 - protein, 9 aa, Artificial Sequence
  Non-cyclic GFR-binding peptide
TSAISMLYL

SEQ ID NO: 4777 - protein, 11 aa, Artificial Sequence
  Non-cyclic GFR-binding peptide
ARLSAISILYL

SEQ ID NO: 4778 - protein, 20 aa, Artificial Sequence
  Non-cyclic GFR-binding peptide
  MOD_RES (6), (7): Xaa is C or S
AAPASXXVPARLSAISILYL

SEQ ID NO: 4779 - protein, 16 aa, Artificial Sequence
  Non-cyclic GFR-binding peptide
  MOD_RES (2), (3): Xaa is C or S
SXXVPARLSAISILYL

SEQ ID NO: 4780 - protein, 17 aa, Artificial Sequence
  Non-cyclic GFR-binding peptide
  MOD_RES (3), (4): Xaa is C or S
KAXXVPTKLSAISILYL

SEQ ID NO: 4781 - protein, 14 aa, Artificial Sequence
  Non-cyclic GFR-binding peptide
  MOD_RES (1), (1): Xaa is C or S
XTPTKMSAISMLYL

SEQ ID NO: 4782 - protein, 12 aa, Artificial Sequence
  Non-cyclic GFR-binding peptide
PTKMSAISMLYL

SEQ ID NO: 4783 - protein, 20 aa, Artificial Sequence
  Non-cyclic GFR-binding peptide
  MOD_RES (6), (7): Xaa is C or S
KASKAXXVPTKLSAISILYL

SEQ ID NO: 4784 - protein, 11 aa, Artificial Sequence
  Non-cyclic GFR-binding peptide
TKMSAISMLYL

SEQ ID NO: 4785 - protein, 17 aa, Artificial Sequence
  Non-cyclic GFR-binding peptide
  MOD_RES (3), (4): Xaa is C or S
ASXXVPARLSAISILYL

SEQ ID NO: 4786 - protein, 12 aa, Artificial Sequence
  Non-cyclic GFR-binding peptide
PARLSAISILYL

SEQ ID NO: 4787 - protein, 19 aa, Artificial Sequence
  Non-cyclic GFR-binding peptide
  MOD_RES (5), (6): Xaa is C or S
ASKAXXVPTKLSAISILYL

SEQ ID NO: 4788 - protein, 14 aa, Artificial Sequence
  Non-cyclic GFR-binding peptide
  MOD_RES (1), (1): Xaa is C or S
XVPARLSAISILYL

SEQ ID NO: 4789 - protein, 19 aa, Artificial Sequence
  Non-cyclic GFR-binding peptide
  MOD_RES (5), (6): Xaa is C or S
SAGPXXTPTKMSAISMLYL

SEQ ID NO: 4790 - protein, 16 aa, Artificial Sequence
  Non-cyclic GFR-binding peptide
  MOD_RES (2), (3): Xaa is C or S
PXXVPEKMSAISILYL

SEQ ID NO: 4791 - protein, 10 aa, Artificial Sequence
  Non-cyclic GFR-binding peptide
KMSAISMLYL

SEQ ID NO: 4792 - protein, 15 aa, Artificial Sequence
  Non-cyclic GFR-binding peptide
  MOD_RES (1), (2): Xaa is C or S
XXVPTKLSAISILYL

SEQ ID NO: 4793 - protein, 11 aa, Artificial Sequence
  Non-cyclic GFR-binding peptide
EKMSAISILYL

SEQ ID NO: 4794 - protein, 17 aa, Artificial Sequence
  Non-cyclic GFR-binding peptide
  MOD_RES (3), (4): Xaa is C or S
STXXAPVKTSAISMLYL

SEQ ID NO: 4795 - protein, 11 aa, Artificial Sequence
  Non-cyclic GFR-binding peptide
TKLSAISILYL

SEQ ID NO: 4796 - protein, 13 aa, Artificial Sequence
  Non-cyclic GFR-binding peptide
APVKTSAISMLYL

SEQ ID NO: 4797 - protein, 12 aa, Artificial Sequence
  Non-cyclic GFR-binding peptide
PVKTSAISMLYL

SEQ ID NO: 4798 - protein, 18 aa, Artificial Sequence
  Non-cyclic GFR-binding peptide
  MOD_RES (4), (5): Xaa is C or S
PSTXXAPVKTSAISMLYL

SEQ ID NO: 4799 - protein, 15 aa, Artificial Sequence
  Non-cyclic GFR-binding peptide
  MOD_RES (1), (2): Xaa is C or S
XXAPVKTSAISMLYL

SEQ ID NO: 4800 - protein, 17 aa, Artificial Sequence
  Non-cyclic GFR-binding peptide
  MOD_RES (3), (4): Xaa is C or S
EPXXVPEKMSAISILYL

SEQ ID NO: 4801 - protein, 18 aa, Artificial Sequence
  Non-cyclic GFR-binding peptide
  MOD_RES (4), (5): Xaa is C or S
SKAXXVPTKLSAISILYL

SEQ ID NO: 4802 - protein, 16 aa, Artificial Sequence
  Non-cyclic GFR-binding peptide
  MOD_RES (2), (3): Xaa is C or S
TXXAPVKTSAISMLYL

SEQ ID NO: 4803 - protein, 24 aa, Artificial Sequence
  Cyclic GFR-binding peptide
DEYDKSAISTLYLDEYDKGGGGGG

SEQ ID NO: 4804 - protein, 20 aa, Artificial Sequence
  Cyclic GFR-binding peptide
GTPGPSAISTLYLDDMGVGG

SEQ ID NO: 4805 - protein, 24 aa, Artificial Sequence
  Cyclic GFR-binding peptide
IGKTPSAISTLYLIGKTPGGGGGG

SEQ ID NO: 4806 - protein, 19 aa, Artificial Sequence
  Cyclic GFR-binding peptide
NAISVLYFDENEKGGGGGG

SEQ ID NO: 4807 - protein, 24 aa, Artificial Sequence
  Cyclic GFR-binding peptide
DSSNNSATSVLYYDSSNNGGGGGG

SEQ ID NO: 4808 - protein, 23 aa, Artificial Sequence
  Cyclic GFR-binding peptide
SAISTLYLEIVRKKPLAAAAAAA

SEQ ID NO: 4809 - protein, 16 aa, Artificial Sequence
  Cyclic GFR-binding peptide
NAISVLYFGGGGGGGG

SEQ ID NO: 4810 - protein, 19 aa, Artificial Sequence
  Cyclic GFR-binding peptide
SATSVLYYGGGLRKHRGGG

SEQ ID NO: 4811 - protein, 26 aa, Artificial Sequence
  Cyclic GFR-binding peptide
WWFWGGGSAISTLYLIGKTPGGGGGG

SEQ ID NO: 4812 - protein, 27 aa, Artificial Sequence
  Cyclic GFR-binding peptide
GTPGPGGGSAISTLYLIGKTPGGGGGG

SEQ ID NO: 4813 - protein, 27 aa, Artificial Sequence
  Cyclic GFR-binding peptide
GTPGPGGGNAISVLYFDENEKGGGGGG

SEQ ID NO: 4814 - protein, 21 aa, Artificial Sequence
  Cyclic GFR-binding peptide
GTPGPGGGSAISMLYLGGGGG

SEQ ID NO: 4815 - protein, 21 aa, Artificial Sequence
  Cyclic GFR-binding peptide
GTPGPSPISTLYKGGGGGGGG

SEQ ID NO: 4816 - protein, 26 aa, Artificial Sequence
  Cyclic GFR-binding peptide
GTPGPGGNAISMLYFVGRKPGGGGGG

SEQ ID NO: 4817 - protein, 26 aa, Artificial Sequence
  Cyclic GFR-binding peptide
GTPGPGGNAISTLYLDENEKGGGGGG

SEQ ID NO: 4818 - protein, 26 aa, Artificial Sequence
  Cyclic GFR-binding peptide
GTPGPGGSAISTLYLDDSSNGGGGGG

SEQ ID NO: 4819 - protein, 26 aa, Artificial Sequence
  Cyclic GFR-binding peptide
GTPGPGGNAISTLYLDDSSNGGGGGG

SEQ ID NO: 4820 - protein, 22 aa, Artificial Sequence
  Cyclic GFR-binding peptide
GTPGPGGSAISTLYLGGGGGGG

SEQ ID NO: 4821 - protein, 26 aa, Artificial Sequence
  Cyclic GFR-binding peptide
WWFWGGGSAISTLYLDEYDKGGGGGG

SEQ ID NO: 4822 - protein, 20 aa, Artificial Sequence
  Cyclic GFR-binding peptide
GTPGPSAISTLYLGGGGGGG

SEQ ID NO: 4823 - protein, 26 aa, Artificial Sequence
  Cyclic GFR-binding peptide
GTPGPGGSATSVLYYDDSSNGGGGGG

SEQ ID NO: 4824 - protein, 21 aa, Artificial Sequence
  Cyclic GFR-binding peptide
GTPGPGGSAISMLYLGGGGGG

SEQ ID NO: 4825 - protein, 25 aa, Artificial Sequence
  Cyclic GFR-binding peptide
VGRKPELEPLPIVYYVGRKPGGGGG

SEQ ID NO: 4826 - protein, 21 aa, Artificial Sequence
  Cyclic GFR-binding peptide
EPLPIVYYVGRTPKVGGGGGG

SEQ ID NO: 4827 - protein, 19 aa, Artificial Sequence
  Cyclic GFR-binding peptide
EPLPIVYYVGRTPGGGGGG

SEQ ID NO: 4828 - protein, 23 aa, Artificial Sequence
  Cyclic GFR-binding peptide
RSVKVAKVRIKPHQGQHGGGGGG

SEQ ID NO: 4829 - protein, 20 aa, Artificial Sequence
  Cyclic GFR-binding peptide
SNITMQIMRIKPHQGGGGGG

SEQ ID NO: 4830 - protein, 24 aa, Artificial Sequence
  Cyclic GFR-binding peptide
EYVRKRPVQVRKIEYVRKGGGGGG

SEQ ID NO: 4831 - protein, 24 aa, Artificial Sequence
  Cyclic GFR-binding peptide
DENKNSSLSILFFDENKNGGGGGG

SEQ ID NO: 4832 - protein, 24 aa, Artificial Sequence
  Cyclic GFR-binding peptide
DENEKSSLSILFFDENEKGGGGGG

SEQ ID NO: 4833 - protein, 24 aa, Artificial Sequence
  Cyclic GFR-binding peptide
DAANNSPISILYIDAANNGGGGGG

SEQ ID NO: 4834 - protein, 16 aa, Artificial Sequence
  Cyclic GFR-binding peptide
SPISILYIGGGGGGGG

SEQ ID NO: 4835 - protein, 24 aa, Artificial Sequence
  Cyclic GFR-binding peptide
DDSSNSPISLLYIDAANNGGGGGG

SEQ ID NO: 4836 - protein, 15 aa, Artificial Sequence
  Cyclic GFR-binding peptide
NAISVLYFGGGGGGG

SEQ ID NO: 4837 - protein, 21 aa, Artificial Sequence
  Cyclic GFR-binding peptide
EPLPIVYYVGRKPKVGGGGGG

SEQ ID NO: 4838 - protein, 19 aa, Artificial Sequence
  Cyclic GFR-binding peptide
EPLPIVYYDDSSNGGGGGG

SEQ ID NO: 4839 - protein, 21 aa, Artificial Sequence
  Cyclic GFR-binding peptide
EPLPIVYYDDSSNGGGGGGGG

SEQ ID NO: 4840 - protein, 19 aa, Artificial Sequence
  Cyclic GFR-binding peptide
SPISILYIDAANNGGGGGG

SEQ ID NO: 4841 - protein, 19 aa, Artificial Sequence
  Cyclic GFR-binding peptide
NAISTLYFDDSSNGGGGGG

SEQ ID NO: 4842 - protein, 23 aa, Artificial Sequence
  Cyclic GFR-binding peptide
KLSAISTLYLEIVRKKPGGGGGG

SEQ ID NO: 4843 - protein, 19 aa, Artificial Sequence
  Cyclic GFR-binding peptide
SPINMLYFNEKNQGGGGGG

SEQ ID NO: 4844 - protein, 19 aa, Artificial Sequence
  Cyclic GFR-binding peptide
EPLPIVYYDDSSNGGGGGG

SEQ ID NO: 4845 - protein, 16 aa, Artificial Sequence
  Cyclic GFR-binding peptide
SAISMLFLGGGGGGGG

SEQ ID NO: 4846 - protein, 19 aa, Artificial Sequence
  Cyclic GFR-binding peptide
SPINILFFDENKNGGGGGG

SEQ ID NO: 4847 - protein, 19 aa, Artificial Sequence
  Cyclic GFR-binding peptide
SNITMQIMIGKTPGGGGGG

SEQ ID NO: 4848 - protein, 19 aa, Artificial Sequence
  Cyclic GFR-binding peptide
SAISTLYLIGKTPKILKNY

SEQ ID NO: 4849 - protein, 24 aa, Artificial Sequence
  Cyclic GFR-binding peptide
WWFWGSAISTLYLIGKTPKILKNY

SEQ ID NO: 4850 - protein, 24 aa, Artificial Sequence
  Cyclic GFR-binding peptide
GTPGPSAISTLYLIGKTPKILKNY

SEQ ID NO: 4851 - protein, 21 aa, Artificial Sequence
  Cyclic GFR-binding peptide
EPLPIVYYVGRTPKVEQLSGG

SEQ ID NO: 4852 - protein, 24 aa, Artificial Sequence
  Cyclic GFR-binding peptide
GGGGGGKDYEDLYLTSIASKDYED

SEQ ID NO: 4853 - protein, 20 aa, Artificial Sequence
  Cyclic GFR-binding peptide
GGVGMDDLYLTSIASPGPTG

SEQ ID NO: 4854 - protein, 24 aa, Artificial Sequence
  Cyclic GFR-binding peptide
GGGGGGPTKGILYLTSIASPTKGI

SEQ ID NO: 4855 - protein, 19 aa, Artificial Sequence
  Cyclic GFR-binding peptide
GGGGGGKENEDFYLVSIAN

SEQ ID NO: 4856 - protein, 24 aa, Artificial Sequence
  Cyclic GFR-binding peptide
GGGGGGNNSSDYYLVSTASNNSSD

SEQ ID NO: 4857 - protein, 23 aa, Artificial Sequence
  Cyclic GFR-binding peptide
AAAAAAALPKKRVIELYLTSIAS

SEQ ID NO: 4858 - protein, 16 aa, Artificial Sequence
  Cyclic GFR-binding peptide
GGGGGGGGFYLVSIAN

SEQ ID NO: 4859 - protein, 19 aa, Artificial Sequence
  Cyclic GFR-binding peptide
GGGRHKRLGGGYYLVSTAS

SEQ ID NO: 4860 - protein, 26 aa, Artificial Sequence
  Cyclic GFR-binding peptide
GGGGGGPTKGILYLTSIASGGGWFWW

SEQ ID NO: 4861 - protein, 27 aa, Artificial Sequence
  Cyclic GFR-binding peptide
GGGGGGPTKGILYLTSIASGGGPGPTG

SEQ ID NO: 4862 - protein, 27 aa, Artificial Sequence
  Cyclic GFR-binding peptide
GGGGGGKENEDFYLVSIANGGGPGPTG

SEQ ID NO: 4863 - protein, 21 aa, Artificial Sequence
  Cyclic GFR-binding peptide
GGGGGLYLMSIASGGGPGPTG

SEQ ID NO: 4864 - protein, 21 aa, Artificial Sequence
  Cyclic GFR-binding peptide
GGGGGGGGKYLTSIPSPGPTG

SEQ ID NO: 4865 - protein, 26 aa, Artificial Sequence
  Cyclic GFR-binding peptide
GGGGGGPKRGVFYLMSIANGGPGPTG

SEQ ID NO: 4866 - protein, 26 aa, Artificial Sequence
  Cyclic GFR-binding peptide
GGGGGGKENEDLYLTSIANGGPGPTG

SEQ ID NO: 4867 - protein, 26 aa, Artificial Sequence
  Cyclic GFR-binding peptide
GGGGGGNSSDDLYLTSIASGGPGPTG

SEQ ID NO: 4868 - protein, 26 aa, Artificial Sequence
  Cyclic GFR-binding peptide
GGGGGGNSSDDLYLTSIANGGPGPTG

SEQ ID NO: 4869 - protein, 22 aa, Artificial Sequence
  Cyclic GFR-binding peptide
GGGGGGGLYLTSIASGGPGPTG

SEQ ID NO: 4870 - protein, 26 aa, Artificial Sequence
  Cyclic GFR-binding peptide
GGGGGGKDYEDLYLTSIASGGGWFWW

SEQ ID NO: 4871 - protein, 20 aa, Artificial Sequence
  Cyclic GFR-binding peptide
GGGGGGGLYLTSIASPGPTG

SEQ ID NO: 4872 - protein, 26 aa, Artificial Sequence
  Cyclic GFR-binding peptide
GGGGGGNSSDDYYLVSTASGGPGPTG

SEQ ID NO: 4873 - protein, 21 aa, Artificial Sequence
  Cyclic GFR-binding peptide
GGGGGGLYLMSIASGGPGPTG

SEQ ID NO: 4874 - protein, 25 aa, Artificial Sequence
  Cyclic GFR-binding peptide
GGGGGPKRGVYYVIPLPELEPKRGV

SEQ ID NO: 4875 - protein, 21 aa, Artificial Sequence
  Cyclic GFR-binding peptide
GGGGGGVKPTRGVYYVIPLPE

SEQ ID NO: 4876 - protein, 19 aa, Artificial Sequence
  Cyclic GFR-binding peptide
GGGGGGPTRGVYYVIPLPE

SEQ ID NO: 4877 - protein, 23 aa, Artificial Sequence
  Cyclic GFR-binding peptide
GGGGGGHQGQHPKIRVKAVKVSR

SEQ ID NO: 4878 - protein, 20 aa, Artificial Sequence
  Cyclic GFR-binding peptide
GGGGGGQHPKIRMIQMTINS

SEQ ID NO: 4879 - protein, 24 aa, Artificial Sequence
  Cyclic GFR-binding peptide
GGGGGGKRVYEIKRVQVPRKRVYE

SEQ ID NO: 4880 - protein, 24 aa, Artificial Sequence
  Cyclic GFR-binding peptide
GGGGGGNKNEDFFLISLSSNKNED

SEQ ID NO: 4881 - protein, 24 aa, Artificial Sequence
  Cyclic GFR-binding peptide
GGGGGGKENEDFFLISLSSKENED

SEQ ID NO: 4882 - protein, 24 aa, Artificial Sequence
  Cyclic GFR-binding peptide
GGGGGGNNAADIYLISIPSNNAAD

SEQ ID NO: 4883 - protein, 16 aa, Artificial Sequence
  Cyclic GFR-binding peptide
GGGGGGGGIYLISIPS

SEQ ID NO: 4884 - protein, 24 aa, Artificial Sequence
  Cyclic GFR-binding peptide
GGGGGGNNAADIYLLSIPSNSSDD

SEQ ID NO: 4885 - protein, 15 aa, Artificial Sequence
  Cyclic GFR-binding peptide
GGGGGGGFYLVSIAN

SEQ ID NO: 4886 - protein, 21 aa, Artificial Sequence
  Cyclic GFR-binding peptide
GGGGGGVKPKRGVYYVIPLPE

SEQ ID NO: 4887 - protein, 19 aa, Artificial Sequence
  Cyclic GFR-binding peptide
GGGGGGNSSDDYYVIPLPE

SEQ ID NO: 4888 - protein, 21 aa, Artificial Sequence
  Cyclic GFR-binding peptide
GGGGGGGGNSSDDYYVIPLPE

SEQ ID NO: 4889 - protein, 19 aa, Artificial Sequence
  Cyclic GFR-binding peptide
GGGGGGNNAADIYLISIPS

SEQ ID NO: 4890 - protein, 19 aa, Artificial Sequence
  Cyclic GFR-binding peptide
GGGGGGNSSDDFYLTSIAN

SEQ ID NO: 4891 - protein, 23 aa, Artificial Sequence
  Cyclic GFR-binding peptide
GGGGGGPKKRVIELYLTSIASLK

SEQ ID NO: 4892 - protein, 19 aa, Artificial Sequence
  Cyclic GFR-binding peptide
GGGGGGQNKENFYLMNIPS

SEQ ID NO: 4893 - protein, 19 aa, Artificial Sequence
  Cyclic GFR-binding peptide
GGGGGGNSSDDYYVIPLPE

SEQ ID NO: 4894 - protein, 16 aa, Artificial Sequence
  Cyclic GFR-binding peptide
GGGGGGGGLFLMSIAS

SEQ ID NO: 4895 - protein, 19 aa, Artificial Sequence
  Cyclic GFR-binding peptide
GGGGGGNKNEDFFLINIPS

SEQ ID NO: 4896 - protein, 19 aa, Artificial Sequence
  Cyclic GFR-binding peptide
GGGGGGPTKGIMIQMTINS

SEQ ID NO: 4897 - protein, 19 aa, Artificial Sequence
  Cyclic GFR-binding peptide
YNKLIKPTKGILYLTSIAS

SEQ ID NO: 4898 - protein, 24 aa, Artificial Sequence
  Cyclic GFR-binding peptide
YNKLIKPTKGILYLTSIASGWFWW

SEQ ID NO: 4899 - protein, 24 aa, Artificial Sequence
  Cyclic GFR-binding peptide
YNKLIKPTKGILYLTSIASPGPTG

SEQ ID NO: 4900 - protein, 21 aa, Artificial Sequence
  Cyclic GFR-binding peptide
GGSLQEVKPTRGVYYVIPLPE

SEQ ID NO: 4901 - protein, 27 aa, Artificial Sequence
  Cyclic GFR-binding peptide
WWFWGVPTKMSAISMLYLDENEKGGGG

SEQ ID NO: 4902 - protein, 29 aa, Artificial Sequence
  Cyclic GFR-binding peptide
GTPGPVPTKLSAISMLYLDENKNGGGGGG

SEQ ID NO: 4903 - protein, 28 aa, Artificial Sequence
  Cyclic GFR-binding peptide
WWFWGGVPTQLSAISMLYLDEYDKAAAA

SEQ ID NO: 4904 - protein, 30 aa, Artificial Sequence
  Cyclic GFR-binding peptide
GTPGPGVPTRLSAISMLYLDDSSNAAAAAA

SEQ ID NO: 4905 - protein, 29 aa, Artificial Sequence
  Cyclic GFR-binding peptide
WWFWGGGVPTKTSAISMLYLDDSSNGGGG

SEQ ID NO: 4906 - protein, 31 aa, Artificial Sequence
  Cyclic GFR-binding peptide
GTPGPGGVPTALSAISMLYLDDSSNGGGGGG

SEQ ID NO: 4907 - protein, 30 aa, Artificial Sequence
  Cyclic GFR-binding peptide
WWFWGGGGVPTDLSAISMLYLDSSNNAAAA

SEQ ID NO: 4908 - protein, 32 aa, Artificial Sequence
  Cyclic GFR-binding peptide
GTPGPGGGVPEKMSAISMLYLDDMGVAAAAAA

SEQ ID NO: 4909 - protein, 27 aa, Artificial Sequence
  Cyclic GFR-binding peptide
WWFWGAPTKLSAISMLYLDKGVVGGGG

SEQ ID NO: 4910 - protein, 29 aa, Artificial Sequence
  Cyclic GFR-binding peptide
GTPGPAPTQLSAISMLYLNDKQQGGGGGG

SEQ ID NO: 4911 - protein, 28 aa, Artificial Sequence
  Cyclic GFR-binding peptide
WWFWGGTPTKMSAISMLYLDAANNAAAA

SEQ ID NO: 4912 - protein, 30 aa, Artificial Sequence
  Cyclic GFR-binding peptide
GTPGPGVPARLSAISMLYLDSANNAAAAAA

SEQ ID NO: 4913 - protein, 29 aa, Artificial Sequence
  Cyclic GFR-binding peptide
WWFWGGGAPVKTSAISMLYLDDSSNGGGG

SEQ ID NO: 4914 - protein, 31 aa, Artificial Sequence
  Cyclic GFR-binding peptide
GTPGPGGVPQALSAISMLYLDNGRVGGGGGG

SEQ ID NO: 4915 - protein, 30 aa, Artificial Sequence
  Cyclic GFR-binding peptide
WWFWGGGGVSQDLSAISMLYLVGRKPAAAA

SEQ ID NO: 4916 - protein, 32 aa, Artificial Sequence
  Cyclic GFR-binding peptide
GTPGPGGGVPQDLSAISMLYLIGKTPAAAAAA

SEQ ID NO: 4917 - protein, 27 aa, Artificial Sequence
  Cyclic GFR-binding peptide
WWFWGSRVHHSAISMLYLVGRTPGGGG

SEQ ID NO: 4918 - protein, 29 aa, Artificial Sequence
  Cyclic GFR-binding peptide
GTPGPTQVQLSAISMLYLRIKPHGGGGGG

SEQ ID NO: 4919 - protein, 28 aa, Artificial Sequence
  Cyclic GFR-binding peptide
WWFWGGVPEELSSLSILFFRIKPHAAAA

SEQ ID NO: 4920 - protein, 30 aa, Artificial Sequence
  Cyclic GFR-binding peptide
GTPGPGVPEKLSSLSILFFRIKPHAAAAAA

SEQ ID NO: 4921 - protein, 29 aa, Artificial Sequence
  Cyclic GFR-binding peptide
WWFWGGGVPEQLSSLSILFFRIKPHGGGG

SEQ ID NO: 4922 - protein, 31 aa, Artificial Sequence
  Cyclic GFR-binding peptide
GTPGPGGVPEKMSSLSILFFEYVRKGGGGGG

SEQ ID NO: 4923 - protein, 30 aa, Artificial Sequence
  Cyclic GFR-binding peptide
WWFWGGGGVPERLSSLSILFFEIVRKAAAA

SEQ ID NO: 4924 - protein, 30 aa, Artificial Sequence
  Cyclic GFR-binding peptide
GTPGPGGGVPEKTSSLSILFFDENEKGGGG

SEQ ID NO: 4925 - protein, 29 aa, Artificial Sequence
  Cyclic GFR-binding peptide
WWFWGVPEALSSLSILFFDENKNGGGGGG

SEQ ID NO: 4926 - protein, 27 aa, Artificial Sequence
  Cyclic GFR-binding peptide
GTPGPVPEDLSSLSILFFDEYDKAAAA

SEQ ID NO: 4927 - protein, 30 aa, Artificial Sequence
  Cyclic GFR-binding peptide
WWFWGGVPTELSSLSILFFDDSSNAAAAAA

SEQ ID NO: 4928 - protein, 28 aa, Artificial Sequence
  Cyclic GFR-binding peptide
GTPGPGAPTKLSSLSILFFDDSSNGGGG

SEQ ID NO: 4929 - protein, 31 aa, Artificial Sequence
  Cyclic GFR-binding peptide
WWFWGGGAPTQLSSLSILFFDDSSNGGGGGG

SEQ ID NO: 4930 - protein, 29 aa, Artificial Sequence
  Cyclic GFR-binding peptide
GTPGPGGVPTKLSSLSILFFDSSNNAAAA

SEQ ID NO: 4931 - protein, 32 aa, Artificial Sequence
  Cyclic GFR-binding peptide
WWFWGGGGTPTKMSSLSILFFDDMGVAAAAAA

SEQ ID NO: 4932 - protein, 30 aa, Artificial Sequence
  Cyclic GFR-binding peptide
GTPGPGGGVPARLSSLSILFFDKGVVGGGG

SEQ ID NO: 4933 - protein, 29 aa, Artificial Sequence
  Cyclic GFR-binding peptide
WWFWGVPTRLSSLSILFFNDKQQGGGGGG

SEQ ID NO: 4934 - protein, 27 aa, Artificial Sequence
  Cyclic GFR-binding peptide
GTPGPAPVKTSSLSILFFDAANNAAAA

SEQ ID NO: 4935 - protein, 30 aa, Artificial Sequence
  Cyclic GFR-binding peptide
WWFWGGVPQALSSLSILFFDSANNAAAAAA

SEQ ID NO: 4936 - protein, 28 aa, Artificial Sequence
  Cyclic GFR-binding peptide
GTPGPGVSQDLSSLSILFFDDSSNGGGG

SEQ ID NO: 4937 - protein, 31 aa, Artificial Sequence
  Cyclic GFR-binding peptide
WWFWGGGVPQDLSSLSILFFDNGRVGGGGGG

SEQ ID NO: 4938 - protein, 29 aa, Artificial Sequence
  Cyclic GFR-binding peptide
GTPGPGGVPTEESSLSILFFVGRKPAAAA

SEQ ID NO: 4939 - protein, 32 aa, Artificial Sequence
  Cyclic GFR-binding peptide
WWFWGGGGVPTGQSSLSILFFIGKTPAAAAAA

SEQ ID NO: 4940 - protein, 30 aa, Artificial Sequence
  Cyclic GFR-binding peptide
GTPGPGGGSRVHHSSLSILFFVGRTPGGGG

SEQ ID NO: 4941 - protein, 29 aa, Artificial Sequence
  Cyclic GFR-binding peptide
WWFWGTQVQLSSLSILFFRIKPHGGGGGG

SEQ ID NO: 4942 - protein, 27 aa, Artificial Sequence
  Cyclic GFR-binding peptide
GTPGPAPTELNAISVLYFRIKPHAAAA

SEQ ID NO: 4943 - protein, 30 aa, Artificial Sequence
  Cyclic GFR-binding peptide
WWFWGGAPTKMNAISVLYFRIKPHAAAAAA

SEQ ID NO: 4944 - protein, 28 aa, Artificial Sequence
  Cyclic GFR-binding peptide
GTPGPGAPTKLNAISVLYFRIKPHGGGG

SEQ ID NO: 4945 - protein, 31 aa, Artificial Sequence
  Cyclic GFR-binding peptide
WWFWGGGAPTRLNAISVLYFEYVRKGGGGGG

SEQ ID NO: 4946 - protein, 29 aa, Artificial Sequence
  Cyclic GFR-binding peptide
GTPGPGGAPTKTNAISVLYFEIVRKAAAA

SEQ ID NO: 4947 - protein, 30 aa, Artificial Sequence
  Cyclic GFR-binding peptide
WWFWGGGGAPTALNAISVLYFDENEKGGGG

SEQ ID NO: 4948 - protein, 32 aa, Artificial Sequence
  Cyclic GFR-binding peptide
GTPGPGGGAPTDLNAISVLYFDENKNGGGGGG

SEQ ID NO: 4949 - protein, 27 aa, Artificial Sequence
  Cyclic GFR-binding peptide
WWFWGVPTELNAISVLYFDEYDKAAAA

SEQ ID NO: 4950 - protein, 29 aa, Artificial Sequence
  Cyclic GFR-binding peptide
GTPGPVPEKMNAISVLYFDDSSNAAAAAA

SEQ ID NO: 4951 - protein, 28 aa, Artificial Sequence
  Cyclic GFR-binding peptide
WWFWGGVPTKLNAISVLYFDDSSNGGGG

SEQ ID NO: 4952 - protein, 30 aa, Artificial Sequence
  Cyclic GFR-binding peptide
GTPGPGTPTKMNAISVLYFDDSSNGGGGGG

SEQ ID NO: 4953 - protein, 29 aa, Artificial Sequence
  Cyclic GFR-binding peptide
WWFWGGGVPARLNAISVLYFDSSNNAAAA

SEQ ID NO: 4954 - protein, 31 aa, Artificial Sequence
  Cyclic GFR-binding peptide
GTPGPGGVPTRLNAISVLYFDDMGVAAAAAA

SEQ ID NO: 4955 - protein, 30 aa, Artificial Sequence
  Cyclic GFR-binding peptide
WWFWGGGGAPVKTNAISVLYFDKGVVGGGG

SEQ ID NO: 4956 - protein, 32 aa, Artificial Sequence
  Cyclic GFR-binding peptide
GTPGPGGGVPQALNAISVLYFNDKQQGGGGGG

SEQ ID NO: 4957 - protein, 27 aa, Artificial Sequence
  Cyclic GFR-binding peptide
WWFWGVSQDLNAISVLYFDAANNAAAA

SEQ ID NO: 4958 - protein, 29 aa, Artificial Sequence
  Cyclic GFR-binding peptide
GTPGPVPQDLNAISVLYFDSANNAAAAAA

SEQ ID NO: 4959 - protein, 28 aa, Artificial Sequence
  Cyclic GFR-binding peptide
WWFWGGVPTEENAISVLYFDDSSNGGGG

SEQ ID NO: 4960 - protein, 30 aa, Artificial Sequence
  Cyclic GFR-binding peptide
GTPGPGVPTGQNAISVLYFDNGRVGGGGGG

SEQ ID NO: 4961 - protein, 29 aa, Artificial Sequence
  Cyclic GFR-binding peptide
WWFWGGGSRVHHNAISVLYFVGRKPAAAA

SEQ ID NO: 4962 - protein, 31 aa, Artificial Sequence
  Cyclic GFR-binding peptide
GTPGPGGTQVQLNAISVLYFIGKTPAAAAAA

SEQ ID NO: 4963 - protein, 30 aa, Artificial Sequence
  Cyclic GFR-binding peptide
WWFWGGGGAPTELSATSVLYYVGRTPGGGG

SEQ ID NO: 4964 - protein, 32 aa, Artificial Sequence
  Cyclic GFR-binding peptide
GTPGPGGGAPTKMSATSVLYYRIKPHGGGGGG

SEQ ID NO: 4965 - protein, 27 aa, Artificial Sequence
  Cyclic GFR-binding peptide
WWFWGAPTKLSATSVLYYRIKPHAAAA

SEQ ID NO: 4966 - protein, 29 aa, Artificial Sequence
  Cyclic GFR-binding peptide
GTPGPAPTQLSATSVLYYRIKPHAAAAAA

SEQ ID NO: 4967 - protein, 28 aa, Artificial Sequence
  Cyclic GFR-binding peptide
WWFWGGAPTRLSATSVLYYRIKPHGGGG

SEQ ID NO: 4968 - protein, 30 aa, Artificial Sequence
  Cyclic GFR-binding peptide
GTPGPGAPTKTSATSVLYYEYVRKGGGGGG

SEQ ID NO: 4969 - protein, 29 aa, Artificial Sequence
  Cyclic GFR-binding peptide
WWFWGGGAPTALSATSVLYYEIVRKAAAA

SEQ ID NO: 4970 - protein, 29 aa, Artificial Sequence
  Cyclic GFR-binding peptide
GTPGPGGAPTDLSATSVLYYDENEKGGGG

SEQ ID NO: 4971 - protein, 32 aa, Artificial Sequence
  Cyclic GFR-binding peptide
WWFWGGGGVPTELSATSVLYYDENKNGGGGGG

SEQ ID NO: 4972 - protein, 30 aa, Artificial Sequence
  Cyclic GFR-binding peptide
GTPGPGGGVPEKMSATSVLYYDEYDKAAAA

SEQ ID NO: 4973 - protein, 29 aa, Artificial Sequence
  Cyclic GFR-binding peptide
WWFWGVPTKLSATSVLYYDDSSNAAAAAA

SEQ ID NO: 4974 - protein, 27 aa, Artificial Sequence
  Cyclic GFR-binding peptide
GTPGPTPTKMSATSVLYYDDSSNGGGG

SEQ ID NO: 4975 - protein, 30 aa, Artificial Sequence
  Cyclic GFR-binding peptide
WWFWGGVPARLSATSVLYYDDSSNGGGGGG

SEQ ID NO: 4976 - protein, 28 aa, Artificial Sequence
  Cyclic GFR-binding peptide
GTPGPGVPTRLSATSVLYYDSSNNAAAA

SEQ ID NO: 4977 - protein, 31 aa, Artificial Sequence
  Cyclic GFR-binding peptide
WWFWGGGAPVKTSATSVLYYDDMGVAAAAAA

SEQ ID NO: 4978 - protein, 29 aa, Artificial Sequence
  Cyclic GFR-binding peptide
GTPGPGGVPQALSATSVLYYDKGVVGGGG

SEQ ID NO: 4979 - protein, 32 aa, Artificial Sequence
  Cyclic GFR-binding peptide
WWFWGGGGVSQDLSATSVLYYNDKQQGGGGGG

SEQ ID NO: 4980 - protein, 30 aa, Artificial Sequence
  Cyclic GFR-binding peptide
GTPGPGGGVPQDLSATSVLYYDAANNAAAA

SEQ ID NO: 4981 - protein, 29 aa, Artificial Sequence
  Cyclic GFR-binding peptide
WWFWGVPTEESATSVLYYDSANNAAAAAA

SEQ ID NO: 4982 - protein, 27 aa, Artificial Sequence
  Cyclic GFR-binding peptide
GTPGPVPTGQSATSVLYYDDSSNGGGG

SEQ ID NO: 4983 - protein, 30 aa, Artificial Sequence
  Cyclic GFR-binding peptide
WWFWGGSRVHHSATSVLYYDNGRVGGGGGG

SEQ ID NO: 4984 - protein, 28 aa, Artificial Sequence
  Cyclic GFR-binding peptide
GTPGPGTQVQLSATSVLYYVGRKPAAAA

SEQ ID NO: 4985 - protein, 31 aa, Artificial Sequence
  Cyclic GFR-binding peptide
WWFWGGGVPTELSPISVLYKIGKTPAAAAAA

SEQ ID NO: 4986 - protein, 29 aa, Artificial Sequence
  Cyclic GFR-binding peptide
GTPGPGGVPTKMSPISVLYKVGRTPGGGG

SEQ ID NO: 4987 - protein, 32 aa, Artificial Sequence
  Cyclic GFR-binding peptide
WWFWGGGGVPTKLSPISVLYKRIKPHGGGGGG

SEQ ID NO: 4988 - protein, 30 aa, Artificial Sequence
  Cyclic GFR-binding peptide
GTPGPGGGVPTQLSPISVLYKRIKPHAAAA

SEQ ID NO: 4989 - protein, 29 aa, Artificial Sequence
  Cyclic GFR-binding peptide
WWFWGVPTRLSPISVLYKRIKPHAAAAAA

SEQ ID NO: 4990 - protein, 27 aa, Artificial Sequence
  Cyclic GFR-binding peptide
GTPGPVPTKTSPISVLYKRIKPHGGGG

SEQ ID NO: 4991 - protein, 30 aa, Artificial Sequence
  Cyclic GFR-binding peptide
WWFWGGVPTALSPISVLYKEYVRKGGGGGG

SEQ ID NO: 4992 - protein, 28 aa, Artificial Sequence
  Cyclic GFR-binding peptide
GTPGPGVPTDLSPISVLYKEIVRKAAAA

SEQ ID NO: 4993 - protein, 29 aa, Artificial Sequence
  Cyclic GFR-binding peptide
WWFWGGGVPEKMSPISVLYKDENEKGGGG

SEQ ID NO: 4994 - protein, 31 aa, Artificial Sequence
  Cyclic GFR-binding peptide
GTPGPGGAPTKLSPISVLYKDENKNGGGGGG

SEQ ID NO: 4995 - protein, 30 aa, Artificial Sequence
  Cyclic GFR-binding peptide
WWFWGGGGAPTQLSPISVLYKDEYDKAAAA

SEQ ID NO: 4996 - protein, 32 aa, Artificial Sequence
  Cyclic GFR-binding peptide
GTPGPGGGTPTKMSPISVLYKDDSSNAAAAAA

SEQ ID NO: 4997 - protein, 27 aa, Artificial Sequence
  Cyclic GFR-binding peptide
WWFWGVPARLSPISVLYKDDSSNGGGG

SEQ ID NO: 4998 - protein, 29 aa, Artificial Sequence
  Cyclic GFR-binding peptide
GTPGPAPVKTSPISVLYKDDSSNGGGGGG

SEQ ID NO: 4999 - protein, 28 aa, Artificial Sequence
  Cyclic GFR-binding peptide
WWFWGGVPQALSPISVLYKDSSNNAAAA

SEQ ID NO: 5000 - protein, 30 aa, Artificial Sequence
  Cyclic GFR-binding peptide
GTPGPGVSQDLSPISVLYKDDMGVAAAAAA

SEQ ID NO: 5001 - protein, 29 aa, Artificial Sequence
  Cyclic GFR-binding peptide
WWFWGGGVPQDLSPISVLYKDKGVVGGGG

SEQ ID NO: 5002 - protein, 31 aa, Artificial Sequence
  Cyclic GFR-binding peptide
GTPGPGGSRVHHSPISVLYKNDKQQGGGGGG

SEQ ID NO: 5003 - protein, 30 aa, Artificial Sequence
  Cyclic GFR-binding peptide
WWFWGGGGTQVQLSPISVLYKDAANNAAAA

SEQ ID NO: 5004 - protein, 32 aa, Artificial Sequence
  Cyclic GFR-binding peptide
GTPGPGGGVPTELEPISILYLDSANNAAAAAA

SEQ ID NO: 5005 - protein, 27 aa, Artificial Sequence
  Cyclic GFR-binding peptide
WWFWGVPTKMEPISILYLDDSSNGGGG

SEQ ID NO: 5006 - protein, 29 aa, Artificial Sequence
  Cyclic GFR-binding peptide
GTPGPVPTKLEPISILYLDNGRVGGGGGG

SEQ ID NO: 5007 - protein, 28 aa, Artificial Sequence
  Cyclic GFR-binding peptide
WWFWGGVPTQLEPISILYLVGRKPAAAA

SEQ ID NO: 5008 - protein, 30 aa, Artificial Sequence
  Cyclic GFR-binding peptide
GTPGPGVPTRLEPISILYLIGKTPAAAAAA

SEQ ID NO: 5009 - protein, 29 aa, Artificial Sequence
  Cyclic GFR-binding peptide
WWFWGGGVPTKTEPISILYLVGRTPGGGG

SEQ ID NO: 5010 - protein, 31 aa, Artificial Sequence
  Cyclic GFR-binding peptide
GTPGPGGVPTALEPISILYLRIKPHGGGGGG

SEQ ID NO: 5011 - protein, 30 aa, Artificial Sequence
  Cyclic GFR-binding peptide
WWFWGGGGVPTDLEPISILYLRIKPHAAAA

SEQ ID NO: 5012 - protein, 32 aa, Artificial Sequence
  Cyclic GFR-binding peptide
GTPGPGGGVPEKMEPISILYLRIKPHAAAAAA

SEQ ID NO: 5013 - protein, 27 aa, Artificial Sequence
  Cyclic GFR-binding peptide
WWFWGAPTKLEPISILYLRIKPHGGGG

SEQ ID NO: 5014 - protein, 29 aa, Artificial Sequence
  Cyclic GFR-binding peptide
GTPGPAPTQLEPISILYLEYVRKGGGGGG

SEQ ID NO: 5015 - protein, 28 aa, Artificial Sequence
  Cyclic GFR-binding peptide
WWFWGGTPTKMEPISILYLEIVRKAAAA

SEQ ID NO: 5016 - protein, 28 aa, Artificial Sequence
  Cyclic GFR-binding peptide
GTPGPGVPARLEPISILYLDENEKGGGG

SEQ ID NO: 5017 - protein, 31 aa, Artificial Sequence
  Cyclic GFR-binding peptide
WWFWGGGAPVKTEPISILYLDENKNGGGGGG

SEQ ID NO: 5018 - protein, 29 aa, Artificial Sequence
  Cyclic GFR-binding peptide
GTPGPGGVPQALEPISILYLDEYDKAAAA

SEQ ID NO: 5019 - protein, 32 aa, Artificial Sequence
  Cyclic GFR-binding peptide
WWFWGGGGVSQDLEPISILYLDDSSNAAAAAA

SEQ ID NO: 5020 - protein, 30 aa, Artificial Sequence
  Cyclic GFR-binding peptide
GTPGPGGGVPQDLEPISILYLDDSSNGGGG

SEQ ID NO: 5021 - protein, 29 aa, Artificial Sequence
  Cyclic GFR-binding peptide
WWFWGSRVHHEPISILYLDDSSNGGGGGG

SEQ ID NO: 5022 - protein, 27 aa, Artificial Sequence
  Cyclic GFR-binding peptide
GTPGPTQVQLEPISILYLDSSNNAAAA

SEQ ID NO: 5023 - protein, 30 aa, Artificial Sequence
  Cyclic GFR-binding peptide
WWFWGGTPTELSPINMLYFDDMGVAAAAAA

SEQ ID NO: 5024 - protein, 28 aa, Artificial Sequence
  Cyclic GFR-binding peptide
GTPGPGTPTKMSPINMLYFDKGVVGGGG

SEQ ID NO: 5025 - protein, 31 aa, Artificial Sequence
  Cyclic GFR-binding peptide
WWFWGGGTPTKLSPINMLYFNDKQQGGGGGG

SEQ ID NO: 5026 - protein, 29 aa, Artificial Sequence
  Cyclic GFR-binding peptide
GTPGPGGTPTQLSPINMLYFDAANNAAAA

SEQ ID NO: 5027 - protein, 32 aa, Artificial Sequence
  Cyclic GFR-binding peptide
WWFWGGGGTPTRLSPINMLYFDSANNAAAAAA

SEQ ID NO: 5028 - protein, 30 aa, Artificial Sequence
  Cyclic GFR-binding peptide
GTPGPGGGTPTKTSPINMLYFDDSSNGGGG

SEQ ID NO: 5029 - protein, 29 aa, Artificial Sequence
  Cyclic GFR-binding peptide
WWFWGTPTALSPINMLYFDNGRVGGGGGG

SEQ ID NO: 5030 - protein, 27 aa, Artificial Sequence
  Cyclic GFR-binding peptide
GTPGPTPTDLSPINMLYFVGRKPAAAA

SEQ ID NO: 5031 - protein, 30 aa, Artificial Sequence
  Cyclic GFR-binding peptide
WWFWGGVPTELSPINMLYFIGKTPAAAAAA

SEQ ID NO: 5032 - protein, 28 aa, Artificial Sequence
  Cyclic GFR-binding peptide
GTPGPGVPEKMSPINMLYFVGRTPGGGG

SEQ ID NO: 5033 - protein, 31 aa, Artificial Sequence
  Cyclic GFR-binding peptide
WWFWGGGAPTKLSPINMLYFRIKPHGGGGGG

SEQ ID NO: 5034 - protein, 29 aa, Artificial Sequence
  Cyclic GFR-binding peptide
GTPGPGGAPTQLSPINMLYFRIKPHAAAA

SEQ ID NO: 5035 - protein, 32 aa, Artificial Sequence
  Cyclic GFR-binding peptide
WWFWGGGGVPTKLSPINMLYFRIKPHAAAAAA

SEQ ID NO: 5036 - protein, 30 aa, Artificial Sequence
  Cyclic GFR-binding peptide
GTPGPGGGVPARLSPINMLYFRIKPHGGGG

SEQ ID NO: 5037 - protein, 29 aa, Artificial Sequence
  Cyclic GFR-binding peptide
WWFWGVPTRLSPINMLYFEYVRKGGGGGG

SEQ ID NO: 5038 - protein, 27 aa, Artificial Sequence
  Cyclic GFR-binding peptide
GTPGPAPVKTSPINMLYFEIVRKAAAA

SEQ ID NO: 5039 - protein, 28 aa, Artificial Sequence
  Cyclic GFR-binding peptide
WWFWGGVPQALSPINMLYFDENEKGGGG

SEQ ID NO: 5040 - protein, 30 aa, Artificial Sequence
  Cyclic GFR-binding peptide
GTPGPGVSQDLSPINMLYFDENKNGGGGGG

SEQ ID NO: 5041 - protein, 29 aa, Artificial Sequence
  Cyclic GFR-binding peptide
WWFWGGGVPQDLSPINMLYFDEYDKAAAA

SEQ ID NO: 5042 - protein, 31 aa, Artificial Sequence
  Cyclic GFR-binding peptide
GTPGPGGVPTEESPINMLYFDDSSNAAAAAA

SEQ ID NO: 5043 - protein, 30 aa, Artificial Sequence
  Cyclic GFR-binding peptide
WWFWGGGGVPTGQSPINMLYFDDSSNGGGG

SEQ ID NO: 5044 - protein, 32 aa, Artificial Sequence
  Cyclic GFR-binding peptide
GTPGPGGGSRVHHSPINMLYFDDSSNGGGGGG

SEQ ID NO: 5045 - protein, 27 aa, Artificial Sequence
  Cyclic GFR-binding peptide
WWFWGTQVQLSPINMLYFDSSNNAAAA

SEQ ID NO: 5046 - protein, 29 aa, Artificial Sequence
  Cyclic GFR-binding peptide
GTPGPVPAELSPISILYIDDMGVAAAAAA

SEQ ID NO: 5047 - protein, 28 aa, Artificial Sequence
  Cyclic GFR-binding peptide
WWFWGGVPAKMSPISILYIDKGVVGGGG

SEQ ID NO: 5048 - protein, 30 aa, Artificial Sequence
  Cyclic GFR-binding peptide
GTPGPGVPAKLSPISILYINDKQQGGGGGG

SEQ ID NO: 5049 - protein, 29 aa, Artificial Sequence
  Cyclic GFR-binding peptide
WWFWGGGVPAQLSPISILYIDAANNAAAA

SEQ ID NO: 5050 - protein, 31 aa, Artificial Sequence
  Cyclic GFR-binding peptide
GTPGPGGVPARLSPISILYIDSANNAAAAAA

SEQ ID NO: 5051 - protein, 30 aa, Artificial Sequence
  Cyclic GFR-binding peptide
WWFWGGGGVPAKTSPISILYIDDSSNGGGG

SEQ ID NO: 5052 - protein, 32 aa, Artificial Sequence
  Cyclic GFR-binding peptide
GTPGPGGGVPAALSPISILYIDNGRVGGGGGG

SEQ ID NO: 5053 - protein, 27 aa, Artificial Sequence
  Cyclic GFR-binding peptide
WWFWGVPADLSPISILYIVGRKPAAAA

SEQ ID NO: 5054 - protein, 29 aa, Artificial Sequence
  Cyclic GFR-binding peptide
GTPGPVPTELSPISILYIIGKTPAAAAAA

SEQ ID NO: 5055 - protein, 28 aa, Artificial Sequence
  Cyclic GFR-binding peptide
WWFWGGVPEKMSPISILYIVGRTPGGGG

SEQ ID NO: 5056 - protein, 30 aa, Artificial Sequence
  Cyclic GFR-binding peptide
GTPGPGAPTKLSPISILYIRIKPHGGGGGG

SEQ ID NO: 5057 - protein, 29 aa, Artificial Sequence
  Cyclic GFR-binding peptide
WWFWGGGAPTQLSPISILYIRIKPHAAAA

SEQ ID NO: 5058 - protein, 31 aa, Artificial Sequence
  Cyclic GFR-binding peptide
GTPGPGGVPTKLSPISILYIRIKPHAAAAAA

SEQ ID NO: 5059 - protein, 30 aa, Artificial Sequence
  Cyclic GFR-binding peptide
WWFWGGGGTPTKMSPISILYIRIKPHGGGG

SEQ ID NO: 5060 - protein, 32 aa, Artificial Sequence
  Cyclic GFR-binding peptide
GTPGPGGGVPTRLSPISILYIEYVRKGGGGGG

SEQ ID NO: 5061 - protein, 27 aa, Artificial Sequence
  Cyclic GFR-binding peptide
WWFWGAPVKTSPISILYIEIVRKAAAA

SEQ ID NO: 5062 - protein, 27 aa, Artificial Sequence
  Cyclic GFR-binding peptide
GTPGPVPQALSPISILYIDENEKGGGG

SEQ ID NO: 5063 - protein, 30 aa, Artificial Sequence
  Cyclic GFR-binding peptide
WWFWGGVSQDLSPISILYIDENKNGGGGGG

SEQ ID NO: 5064 - protein, 28 aa, Artificial Sequence
  Cyclic GFR-binding peptide
GTPGPGVPQDLSPISILYIDEYDKAAAA

SEQ ID NO: 5065 - protein, 31 aa, Artificial Sequence
  Cyclic GFR-binding peptide
WWFWGGGVPTEESPISILYIDDSSNAAAAAA

SEQ ID NO: 5066 - protein, 29 aa, Artificial Sequence
  Cyclic GFR-binding peptide
GTPGPGGVPTGQSPISILYIDDSSNGGGG

SEQ ID NO: 5067 - protein, 32 aa, Artificial Sequence
  Cyclic GFR-binding peptide
WWFWGGGGSRVHHSPISILYIDDSSNGGGGGG

SEQ ID NO: 5068 - protein, 30 aa, Artificial Sequence
  Cyclic GFR-binding peptide
GTPGPGGGTQVQLSPISILYIDSSNNAAAA

SEQ ID NO: 5069 - protein, 29 aa, Artificial Sequence
  Cyclic GFR-binding peptide
WWFWGVPTELSPISILFIDDMGVAAAAAA

SEQ ID NO: 5070 - protein, 27 aa, Artificial Sequence
  Cyclic GFR-binding peptide
GTPGPVPTKMSPISILFIDKGVVGGGG

SEQ ID NO: 5071 - protein, 30 aa, Artificial Sequence
  Cyclic GFR-binding peptide
WWFWGGVPTKLSPISILFINDKQQGGGGGG

SEQ ID NO: 5072 - protein, 28 aa, Artificial Sequence
  Cyclic GFR-binding peptide
GTPGPGVPTQLSPISILFIDAANNAAAA

SEQ ID NO: 5073 - protein, 31 aa, Artificial Sequence
  Cyclic GFR-binding peptide
WWFWGGGVPTRLSPISILFIDSANNAAAAAA

SEQ ID NO: 5074 - protein, 29 aa, Artificial Sequence
  Cyclic GFR-binding peptide
GTPGPGGVPTKTSPISILFIDDSSNGGGG

SEQ ID NO: 5075 - protein, 32 aa, Artificial Sequence
  Cyclic GFR-binding peptide
WWFWGGGGVPTALSPISILFIDNGRVGGGGGG

SEQ ID NO: 5076 - protein, 30 aa, Artificial Sequence
  Cyclic GFR-binding peptide
GTPGPGGGVPTDLSPISILFIVGRKPAAAA

SEQ ID NO: 5077 - protein, 29 aa, Artificial Sequence
  Cyclic GFR-binding peptide
WWFWGVPEKMSPISILFIIGKTPAAAAAA

SEQ ID NO: 5078 - protein, 27 aa, Artificial Sequence
  Cyclic GFR-binding peptide
GTPGPAPTKLSPISILFIVGRTPGGGG

SEQ ID NO: 5079 - protein, 30 aa, Artificial Sequence
  Cyclic GFR-binding peptide
WWFWGGAPTQLSPISILFIRIKPHGGGGGG

SEQ ID NO: 5080 - protein, 28 aa, Artificial Sequence
  Cyclic GFR-binding peptide
GTPGPGTPTKMSPISILFIRIKPHAAAA

SEQ ID NO: 5081 - protein, 31 aa, Artificial Sequence
  Cyclic GFR-binding peptide
WWFWGGGVPARLSPISILFIRIKPHAAAAAA

SEQ ID NO: 5082 - protein, 29 aa, Artificial Sequence
  Cyclic GFR-binding peptide
GTPGPGGAPVKTSPISILFIRIKPHGGGG

SEQ ID NO: 5083 - protein, 32 aa, Artificial Sequence
  Cyclic GFR-binding peptide
WWFWGGGGVPQALSPISILFIEYVRKGGGGGG

SEQ ID NO: 5084 - protein, 30 aa, Artificial Sequence
  Cyclic GFR-binding peptide
GTPGPGGGVSQDLSPISILFIEIVRKAAAA

SEQ ID NO: 5085 - protein, 27 aa, Artificial Sequence
  Cyclic GFR-binding peptide
WWFWGVPQDLSPISILFIDENEKGGGG

SEQ ID NO: 5086 - protein, 29 aa, Artificial Sequence
  Cyclic GFR-binding peptide
GTPGPSRVHHSPISILFIDENKNGGGGGG

SEQ ID NO: 5087 - protein, 28 aa, Artificial Sequence
  Cyclic GFR-binding peptide
WWFWGGTQVQLSPISILFIDEYDKAAAA

SEQ ID NO: 5088 - protein, 30 aa, Artificial Sequence
  Cyclic GFR-binding peptide
GTPGPGAPVELKPLSMLYVDDSSNAAAAAA

SEQ ID NO: 5089 - protein, 29 aa, Artificial Sequence
  Cyclic GFR-binding peptide
WWFWGGGAPVKMKPLSMLYVDDSSNGGGG

SEQ ID NO: 5090 - protein, 31 aa, Artificial Sequence
  Cyclic GFR-binding peptide
GTPGPGGAPVKLKPLSMLYVDDSSNGGGGGG

SEQ ID NO: 5091 - protein, 30 aa, Artificial Sequence
  Cyclic GFR-binding peptide
WWFWGGGGAPVQLKPLSMLYVDSSNNAAAA

SEQ ID NO: 5092 - protein, 32 aa, Artificial Sequence
  Cyclic GFR-binding peptide
GTPGPGGGAPVRLKPLSMLYVDDMGVAAAAAA

SEQ ID NO: 5093 - protein, 27 aa, Artificial Sequence
  Cyclic GFR-binding peptide
WWFWGAPVALKPLSMLYVDKGVVGGGG

SEQ ID NO: 5094 - protein, 29 aa, Artificial Sequence
  Cyclic GFR-binding peptide
GTPGPAPVDLKPLSMLYVNDKQQGGGGGG

SEQ ID NO: 5095 - protein, 28 aa, Artificial Sequence
  Cyclic GFR-binding peptide
WWFWGGVPTELKPLSMLYVDAANNAAAA

SEQ ID NO: 5096 - protein, 30 aa, Artificial Sequence
  Cyclic GFR-binding peptide
GTPGPGVPEKMKPLSMLYVDSANNAAAAAA

SEQ ID NO: 5097 - protein, 29 aa, Artificial Sequence
  Cyclic GFR-binding peptide
WWFWGGGAPTKLKPLSMLYVDDSSNGGGG

SEQ ID NO: 5098 - protein, 31 aa, Artificial Sequence
  Cyclic GFR-binding peptide
GTPGPGGAPTQLKPLSMLYVDNGRVGGGGGG

SEQ ID NO: 5099 - protein, 30 aa, Artificial Sequence
  Cyclic GFR-binding peptide
WWFWGGGGVPTKLKPLSMLYVVGRKPAAAA

SEQ ID NO: 5100 - protein, 32 aa, Artificial Sequence
  Cyclic GFR-binding peptide
GTPGPGGGTPTKMKPLSMLYVIGKTPAAAAAA

SEQ ID NO: 5101 - protein, 27 aa, Artificial Sequence
  Cyclic GFR-binding peptide
WWFWGVPARLKPLSMLYVVGRTPGGGG

SEQ ID NO: 5102 - protein, 29 aa, Artificial Sequence
  Cyclic GFR-binding peptide
GTPGPVPTRLKPLSMLYVRIKPHGGGGGG

SEQ ID NO: 5103 - protein, 28 aa, Artificial Sequence
  Cyclic GFR-binding peptide
WWFWGGVPQALKPLSMLYVRIKPHAAAA

SEQ ID NO: 5104 - protein, 30 aa, Artificial Sequence
  Cyclic GFR-binding peptide
GTPGPGVSQDLKPLSMLYVRIKPHAAAAAA

SEQ ID NO: 5105 - protein, 29 aa, Artificial Sequence
  Cyclic GFR-binding peptide
WWFWGGGVPQDLKPLSMLYVRIKPHGGGG

SEQ ID NO: 5106 - protein, 31 aa, Artificial Sequence
  Cyclic GFR-binding peptide
GTPGPGGVPTEEKPLSMLYVEYVRKGGGGGG

SEQ ID NO: 5107 - protein, 30 aa, Artificial Sequence
  Cyclic GFR-binding peptide
WWFWGGGGVPTGQKPLSMLYVEIVRKAAAA

SEQ ID NO: 5108 - protein, 30 aa, Artificial Sequence
  Cyclic GFR-binding peptide
GTPGPGGGSRVHHKPLSMLYVDENEKGGGG

SEQ ID NO: 5109 - protein, 29 aa, Artificial Sequence
  Cyclic GFR-binding peptide
WWFWGTQVQLKPLSMLYVDENKNGGGGGG

SEQ ID NO: 5110 - protein, 27 aa, Artificial Sequence
  Cyclic GFR-binding peptide
GTPGPVPQELEPLPIVYYDEYDKAAAA

SEQ ID NO: 5111 - protein, 30 aa, Artificial Sequence
  Cyclic GFR-binding peptide
WWFWGGVPQKMEPLPIVYYDDSSNAAAAAA

SEQ ID NO: 5112 - protein, 28 aa, Artificial Sequence
  Cyclic GFR-binding peptide
GTPGPGVPQKLEPLPIVYYDDSSNGGGG

SEQ ID NO: 5113 - protein, 31 aa, Artificial Sequence
  Cyclic GFR-binding peptide
WWFWGGGVPQQLEPLPIVYYDDSSNGGGGGG

SEQ ID NO: 5114 - protein, 29 aa, Artificial Sequence
  Cyclic GFR-binding peptide
GTPGPGGVPQRLEPLPIVYYDSSNNAAAA

SEQ ID NO: 5115 - protein, 32 aa, Artificial Sequence
  Cyclic GFR-binding peptide
WWFWGGGGVPQKTEPLPIVYYDDMGVAAAAAA

SEQ ID NO: 5116 - protein, 30 aa, Artificial Sequence
  Cyclic GFR-binding peptide
GTPGPGGGVPQDLEPLPIVYYDKGVVGGGG

SEQ ID NO: 5117 - protein, 29 aa, Artificial Sequence
  Cyclic GFR-binding peptide
WWFWGVPTELEPLPIVYYNDKQQGGGGGG

SEQ ID NO: 5118 - protein, 27 aa, Artificial Sequence
  Cyclic GFR-binding peptide
GTPGPVPEKMEPLPIVYYDAANNAAAA

SEQ ID NO: 5119 - protein, 30 aa, Artificial Sequence
  Cyclic GFR-binding peptide
WWFWGGAPTKLEPLPIVYYDSANNAAAAAA

SEQ ID NO: 5120 - protein, 28 aa, Artificial Sequence
  Cyclic GFR-binding peptide
GTPGPGAPTQLEPLPIVYYDDSSNGGGG

SEQ ID NO: 5121 - protein, 31 aa, Artificial Sequence
  Cyclic GFR-binding peptide
WWFWGGGVPTKLEPLPIVYYDNGRVGGGGGG

SEQ ID NO: 5122 - protein, 29 aa, Artificial Sequence
  Cyclic GFR-binding peptide
GTPGPGGTPTKMEPLPIVYYVGRKPAAAA

SEQ ID NO: 5123 - protein, 32 aa, Artificial Sequence
  Cyclic GFR-binding peptide
WWFWGGGGVPARLEPLPIVYYIGKTPAAAAAA

SEQ ID NO: 5124 - protein, 30 aa, Artificial Sequence
  Cyclic GFR-binding peptide
GTPGPGGGVPTRLEPLPIVYYVGRTPGGGG

SEQ ID NO: 5125 - protein, 29 aa, Artificial Sequence
  Cyclic GFR-binding peptide
WWFWGAPVKTEPLPIVYYRIKPHGGGGGG

SEQ ID NO: 5126 - protein, 27 aa, Artificial Sequence
  Cyclic GFR-binding peptide
GTPGPVSQDLEPLPIVYYRIKPHAAAA

SEQ ID NO: 5127 - protein, 30 aa, Artificial Sequence
  Cyclic GFR-binding peptide
WWFWGGVPTEEEPLPIVYYRIKPHAAAAAA

SEQ ID NO: 5128 - protein, 28 aa, Artificial Sequence
  Cyclic GFR-binding peptide
GTPGPGVPTGQEPLPIVYYRIKPHGGGG

SEQ ID NO: 5129 - protein, 31 aa, Artificial Sequence
  Cyclic GFR-binding peptide
WWFWGGGSRVHHEPLPIVYYEYVRKGGGGGG

SEQ ID NO: 5130 - protein, 29 aa, Artificial Sequence
  Cyclic GFR-binding peptide
GTPGPGGTQVQLEPLPIVYYEIVRKAAAA

SEQ ID NO: 5131 - protein, 30 aa, Artificial Sequence
  Cyclic GFR-binding peptide
WWFWGGGGVSQELEPLTILYYDENEKGGGG

SEQ ID NO: 5132 - protein, 32 aa, Artificial Sequence
  Cyclic GFR-binding peptide
GTPGPGGGVSQKMEPLTILYYDENKNGGGGGG

SEQ ID NO: 5133 - protein, 27 aa, Artificial Sequence
  Cyclic GFR-binding peptide
WWFWGVSQKLEPLTILYYDEYDKAAAA

SEQ ID NO: 5134 - protein, 29 aa, Artificial Sequence
  Cyclic GFR-binding peptide
GTPGPVSQQLEPLTILYYDDSSNAAAAAA

SEQ ID NO: 5135 - protein, 28 aa, Artificial Sequence
  Cyclic GFR-binding peptide
WWFWGGVSQRLEPLTILYYDDSSNGGGG

SEQ ID NO: 5136 - protein, 30 aa, Artificial Sequence
  Cyclic GFR-binding peptide
GTPGPGVSQKTEPLTILYYDDSSNGGGGGG

SEQ ID NO: 5137 - protein, 29 aa, Artificial Sequence
  Cyclic GFR-binding peptide
WWFWGGGVSQALEPLTILYYDSSNNAAAA

SEQ ID NO: 5138 - protein, 31 aa, Artificial Sequence
  Cyclic GFR-binding peptide
GTPGPGGVSQDLEPLTILYYDDMGVAAAAAA

SEQ ID NO: 5139 - protein, 30 aa, Artificial Sequence
  Cyclic GFR-binding peptide
WWFWGGGGVPTELEPLTILYYDKGVVGGGG

SEQ ID NO: 5140 - protein, 32 aa, Artificial Sequence
  Cyclic GFR-binding peptide
GTPGPGGGVPEKMEPLTILYYNDKQQGGGGGG

SEQ ID NO: 5141 - protein, 27 aa, Artificial Sequence
  Cyclic GFR-binding peptide
WWFWGAPTKLEPLTILYYDAANNAAAA

SEQ ID NO: 5142 - protein, 29 aa, Artificial Sequence
  Cyclic GFR-binding peptide
GTPGPAPTQLEPLTILYYDSANNAAAAAA

SEQ ID NO: 5143 - protein, 28 aa, Artificial Sequence
  Cyclic GFR-binding peptide
WWFWGGVPTKLEPLTILYYDDSSNGGGG

SEQ ID NO: 5144 - protein, 30 aa, Artificial Sequence
  Cyclic GFR-binding peptide
GTPGPGTPTKMEPLTILYYDNGRVGGGGGG

SEQ ID NO: 5145 - protein, 29 aa, Artificial Sequence
  Cyclic GFR-binding peptide
WWFWGGGVPARLEPLTILYYVGRKPAAAA

SEQ ID NO: 5146 - protein, 31 aa, Artificial Sequence
  Cyclic GFR-binding peptide
GTPGPGGVPTRLEPLTILYYIGKTPAAAAAA

SEQ ID NO: 5147 - protein, 30 aa, Artificial Sequence
  Cyclic GFR-binding peptide
WWFWGGGGAPVKTEPLTILYYVGRTPGGGG

SEQ ID NO: 5148 - protein, 32 aa, Artificial Sequence
  Cyclic GFR-binding peptide
GTPGPGGGVPQALEPLTILYYRIKPHGGGGGG

SEQ ID NO: 5149 - protein, 27 aa, Artificial Sequence
  Cyclic GFR-binding peptide
WWFWGVPTEEEPLTILYYRIKPHAAAA

SEQ ID NO: 5150 - protein, 29 aa, Artificial Sequence
  Cyclic GFR-binding peptide
GTPGPVPTGQEPLTILYYRIKPHAAAAAA

SEQ ID NO: 5151 - protein, 28 aa, Artificial Sequence
  Cyclic GFR-binding peptide
WWFWGGSRVHHEPLTILYYRIKPHGGGG

SEQ ID NO: 5152 - protein, 30 aa, Artificial Sequence
  Cyclic GFR-binding peptide
GTPGPGTQVQLEPLTILYYEYVRKGGGGGG

SEQ ID NO: 5153 - protein, 29 aa, Artificial Sequence
  Cyclic GFR-binding peptide
WWFWGGGVPQELEPLTILYYEIVRKAAAA

SEQ ID NO: 5154 - protein, 29 aa, Artificial Sequence
  Cyclic GFR-binding peptide
GTPGPGGVPQKMEPLTILYYDENEKGGGG

SEQ ID NO: 5155 - protein, 32 aa, Artificial Sequence
  Cyclic GFR-binding peptide
WWFWGGGGVPQKLEPLTILYYDENKNGGGGGG

SEQ ID NO: 5156 - protein, 30 aa, Artificial Sequence
  Cyclic GFR-binding peptide
GTPGPGGGVPQQLEPLTILYYDEYDKAAAA

SEQ ID NO: 5157 - protein, 29 aa, Artificial Sequence
  Cyclic GFR-binding peptide
WWFWGVPQRLEPLTILYYDDSSNAAAAAA

SEQ ID NO: 5158 - protein, 27 aa, Artificial Sequence
  Cyclic GFR-binding peptide
GTPGPVPQKTEPLTILYYDDSSNGGGG

SEQ ID NO: 5159 - protein, 30 aa, Artificial Sequence
  Cyclic GFR-binding peptide
WWFWGGVPQDLEPLTILYYDDSSNGGGGGG

SEQ ID NO: 5160 - protein, 28 aa, Artificial Sequence
  Cyclic GFR-binding peptide
GTPGPGVPTGQSNITMQIMDSSNNAAAA

SEQ ID NO: 5161 - protein, 31 aa, Artificial Sequence
  Cyclic GFR-binding peptide
WWFWGGGVPEKMSNITMQIMDDMGVAAAAAA

SEQ ID NO: 5162 - protein, 29 aa, Artificial Sequence
  Cyclic GFR-binding peptide
GTPGPGGAPTKLSNITMQIMDKGVVGGGG

SEQ ID NO: 5163 - protein, 32 aa, Artificial Sequence
  Cyclic GFR-binding peptide
WWFWGGGGAPTQLSNITMQIMNDKQQGGGGGG

SEQ ID NO: 5164 - protein, 30 aa, Artificial Sequence
  Cyclic GFR-binding peptide
GTPGPGGGTPTKMSNITMQIMDAANNAAAA

SEQ ID NO: 5165 - protein, 29 aa, Artificial Sequence
  Cyclic GFR-binding peptide
WWFWGVPARLSNITMQIMDSANNAAAAAA

SEQ ID NO: 5166 - protein, 27 aa, Artificial Sequence
  Cyclic GFR-binding peptide
GTPGPAPVKTSNITMQIMDDSSNGGGG

SEQ ID NO: 5167 - protein, 30 aa, Artificial Sequence
  Cyclic GFR-binding peptide
WWFWGGVPQALSNITMQIMDNGRVGGGGGG

SEQ ID NO: 5168 - protein, 28 aa, Artificial Sequence
  Cyclic GFR-binding peptide
GTPGPGVSQDLSNITMQIMVGRKPAAAA

SEQ ID NO: 5169 - protein, 31 aa, Artificial Sequence
  Cyclic GFR-binding peptide
WWFWGGGVPQDLSNITMQIMIGKTPAAAAAA

SEQ ID NO: 5170 - protein, 29 aa, Artificial Sequence
  Cyclic GFR-binding peptide
GTPGPGGSRVHHSNITMQIMVGRTPGGGG

SEQ ID NO: 5171 - protein, 32 aa, Artificial Sequence
  Cyclic GFR-binding peptide
WWFWGGGGTQVQLSNITMQIMRIKPHGGGGGG

SEQ ID NO: 5172 - protein, 30 aa, Artificial Sequence
  Cyclic GFR-binding peptide
GTPGPGGGSRVQLRSVKVAKVRIKPHAAAA

SEQ ID NO: 5173 - protein, 29 aa, Artificial Sequence
  Cyclic GFR-binding peptide
WWFWGVPTELRSVKVAKVRIKPHAAAAAA

SEQ ID NO: 5174 - protein, 27 aa, Artificial Sequence
  Cyclic GFR-binding peptide
GTPGPVPEKMRSVKVAKVRIKPHGGGG

SEQ ID NO: 5175 - protein, 30 aa, Artificial Sequence
  Cyclic GFR-binding peptide
WWFWGGAPTKLRSVKVAKVEYVRKGGGGGG

SEQ ID NO: 5176 - protein, 28 aa, Artificial Sequence
  Cyclic GFR-binding peptide
GTPGPGAPTQLRSVKVAKVEIVRKAAAA

SEQ ID NO: 5177 - protein, 29 aa, Artificial Sequence
  Cyclic GFR-binding peptide
WWFWGGGVPTKLRSVKVAKVDENEKGGGG

SEQ ID NO: 5178 - protein, 31 aa, Artificial Sequence
  Cyclic GFR-binding peptide
GTPGPGGTPTKMRSVKVAKVDENKNGGGGGG

SEQ ID NO: 5179 - protein, 30 aa, Artificial Sequence
  Cyclic GFR-binding peptide
WWFWGGGGVPARLRSVKVAKVDEYDKAAAA

SEQ ID NO: 5180 - protein, 32 aa, Artificial Sequence
  Cyclic GFR-binding peptide
GTPGPGGGVPTRLRSVKVAKVDDSSNAAAAAA

SEQ ID NO: 5181 - protein, 27 aa, Artificial Sequence
  Cyclic GFR-binding peptide
WWFWGAPVKTRSVKVAKVDDSSNGGGG

SEQ ID NO: 5182 - protein, 29 aa, Artificial Sequence
  Cyclic GFR-binding peptide
GTPGPVPQALRSVKVAKVDDSSNGGGGGG

SEQ ID NO: 5183 - protein, 28 aa, Artificial Sequence
  Cyclic GFR-binding peptide
WWFWGGVSQDLRSVKVAKVDSSNNAAAA

SEQ ID NO: 5184 - protein, 30 aa, Artificial Sequence
  Cyclic GFR-binding peptide
GTPGPGVPQDLRSVKVAKVDDMGVAAAAAA

SEQ ID NO: 5185 - protein, 29 aa, Artificial Sequence
  Cyclic GFR-binding peptide
WWFWGGGVPTEERSVKVAKVDKGVVGGGG

SEQ ID NO: 5186 - protein, 31 aa, Artificial Sequence
  Cyclic GFR-binding peptide
GTPGPGGVPTGQRSVKVAKVNDKQQGGGGGG

SEQ ID NO: 5187 - protein, 30 aa, Artificial Sequence
  Cyclic GFR-binding peptide
WWFWGGGGTQVQLRSVKVAKVDAANNAAAA

SEQ ID NO: 5188 - protein, 32 aa, Artificial Sequence
  Cyclic GFR-binding peptide
GTPGPGGGTQVHHRPVQVRKIDSANNAAAAAA

SEQ ID NO: 5189 - protein, 27 aa, Artificial Sequence
  Cyclic GFR-binding peptide
WWFWGVPTELRPVQVRKIDDSSNGGGG

SEQ ID NO: 5190 - protein, 29 aa, Artificial Sequence
  Cyclic GFR-binding peptide
GTPGPVPEKMRPVQVRKIDNGRVGGGGGG

SEQ ID NO: 5191 - protein, 28 aa, Artificial Sequence
  Cyclic GFR-binding peptide
WWFWGGAPTKLRPVQVRKIVGRKPAAAA

SEQ ID NO: 5192 - protein, 30 aa, Artificial Sequence
  Cyclic GFR-binding peptide
GTPGPGAPTQLRPVQVRKIIGKTPAAAAAA

SEQ ID NO: 5193 - protein, 29 aa, Artificial Sequence
  Cyclic GFR-binding peptide
WWFWGGGVPTKLRPVQVRKIVGRTPGGGG

SEQ ID NO: 5194 - protein, 31 aa, Artificial Sequence
  Cyclic GFR-binding peptide
GTPGPGGTPTKMRPVQVRKIRIKPHGGGGGG

SEQ ID NO: 5195 - protein, 30 aa, Artificial Sequence
  Cyclic GFR-binding peptide
WWFWGGGGVPARLRPVQVRKIRIKPHAAAA

SEQ ID NO: 5196 - protein, 32 aa, Artificial Sequence
  Cyclic GFR-binding peptide
GTPGPGGGVPTRLRPVQVRKIRIKPHAAAAAA

SEQ ID NO: 5197 - protein, 27 aa, Artificial Sequence
  Cyclic GFR-binding peptide
WWFWGAPVKTRPVQVRKIRIKPHGGGG

SEQ ID NO: 5198 - protein, 29 aa, Artificial Sequence
  Cyclic GFR-binding peptide
GTPGPVPQALRPVQVRKIEYVRKGGGGGG

SEQ ID NO: 5199 - protein, 28 aa, Artificial Sequence
  Cyclic GFR-binding peptide
WWFWGGVSQDLRPVQVRKIEIVRKAAAA

SEQ ID NO: 5200 - protein, 28 aa, Artificial Sequence
  Cyclic GFR-binding peptide
GTPGPGVPQDLRPVQVRKIDENEKGGGG

SEQ ID NO: 5201 - protein, 31 aa, Artificial Sequence
  Cyclic GFR-binding peptide
WWFWGGGVPTEERPVQVRKIDENKNGGGGGG

SEQ ID NO: 5202 - protein, 29 aa, Artificial Sequence
  Cyclic GFR-binding peptide
GTPGPGGVPTGQRPVQVRKIDEYDKAAAA

SEQ ID NO: 5203 - protein, 32 aa, Artificial Sequence
  Cyclic GFR-binding peptide
WWFWGGGGSRVHHRPVQVRKIDDSSNAAAAAA

SEQ ID NO: 5204 - protein, 27 aa, Artificial Sequence
  Cyclic GFR-binding peptide
GTPGPGGGSAISILYLDENEKVVGGGG

SEQ ID NO: 5205 - protein, 26 aa, Artificial Sequence
  Cyclic GFR-binding peptide
WWFWGSAISVLYLDENKNVVGGGGGG

SEQ ID NO: 5206 - protein, 24 aa, Artificial Sequence
  Cyclic GFR-binding peptide
GTPGPSSLSMLFFDEYDKVVAAAA

SEQ ID NO: 5207 - protein, 27 aa, Artificial Sequence
  Cyclic GFR-binding peptide
WWFWGGSSLSVLFFDDSSNVIAAAAAA

SEQ ID NO: 5208 - protein, 25 aa, Artificial Sequence
  Cyclic GFR-binding peptide
GTPGPGNAISMLYFDDSSNVIGGGG

SEQ ID NO: 5209 - protein, 28 aa, Artificial Sequence
  Cyclic GFR-binding peptide
WWFWGGGNAISILYFDDSSNVIGGGGGG

SEQ ID NO: 5210 - protein, 26 aa, Artificial Sequence
  Cyclic GFR-binding peptide
GTPGPGGSATSMLYYDSSNNVIAAAA

SEQ ID NO: 5211 - protein, 29 aa, Artificial Sequence
  Cyclic GFR-binding peptide
WWFWGGGGSATSILYYDDMGVPTAAAAAA

SEQ ID NO: 5212 - protein, 27 aa, Artificial Sequence
  Cyclic GFR-binding peptide
GTPGPGGGSPISMLYKDKGVVTYGGGG

SEQ ID NO: 5213 - protein, 26 aa, Artificial Sequence
  Cyclic GFR-binding peptide
WWFWGSPISILYKNDKQQIIGGGGGG

SEQ ID NO: 5214 - protein, 24 aa, Artificial Sequence
  Cyclic GFR-binding peptide
GTPGPEPISMLYLDAANNVVAAAA

SEQ ID NO: 5215 - protein, 27 aa, Artificial Sequence
  Cyclic GFR-binding peptide
WWFWGGEPISVLYLDSANNVVAAAAAA

SEQ ID NO: 5216 - protein, 25 aa, Artificial Sequence
  Cyclic GFR-binding peptide
GTPGPGSPINILYFDDSSNVIGGGG

SEQ ID NO: 5217 - protein, 28 aa, Artificial Sequence
  Cyclic GFR-binding peptide
WWFWGGGSPINVLYFDNGRVLLGGGGGG

SEQ ID NO: 5218 - protein, 26 aa, Artificial Sequence
  Cyclic GFR-binding peptide
GTPGPGGSPISMLYIVGRKPKVAAAA

SEQ ID NO: 5219 - protein, 29 aa, Artificial Sequence
  Cyclic GFR-binding peptide
WWFWGGGGSPISVLYIIGKTPKIAAAAAA

SEQ ID NO: 5220 - protein, 27 aa, Artificial Sequence
  Cyclic GFR-binding peptide
GTPGPGGGSPISMLFIVGRTPKVGGGG

SEQ ID NO: 5221 - protein, 28 aa, Artificial Sequence
  Cyclic GFR-binding peptide
WWFWGSPISVLFIRIKPHQGQHGGGGGG

SEQ ID NO: 5222 - protein, 26 aa, Artificial Sequence
  Cyclic GFR-binding peptide
GTPGPKPLSILYVRIKPHQGQHAAAA

SEQ ID NO: 5223 - protein, 29 aa, Artificial Sequence
  Cyclic GFR-binding peptide
WWFWGGKPLSVLYVRIKPHQGQHAAAAAA

SEQ ID NO: 5224 - protein, 27 aa, Artificial Sequence
  Cyclic GFR-binding peptide
GTPGPGEPLPMVYYRIKPHQGQHGGGG

SEQ ID NO: 5225 - protein, 30 aa, Artificial Sequence
  Cyclic GFR-binding peptide
WWFWGGGEPLPVVYYEYVRKKPKLGGGGGG

SEQ ID NO: 5226 - protein, 28 aa, Artificial Sequence
  Cyclic GFR-binding peptide
GTPGPGGEPLTMLYYEIVRKKPIFAAAA

SEQ ID NO: 5227 - protein, 29 aa, Artificial Sequence
  Cyclic GFR-binding peptide
WWFWGGGGEPLTVLYYDENEKVVAAAAAA

SEQ ID NO: 5228 - protein, 27 aa, Artificial Sequence
  Cyclic GFR-binding peptide
GTPGPGGGSNITIQIMDENKNVVGGGG

SEQ ID NO: 5229 - protein, 26 aa, Artificial Sequence
  Cyclic GFR-binding peptide
WWFWGSNITVQIMDEYDKVVGGGGGG

SEQ ID NO: 5230 - protein, 24 aa, Artificial Sequence
  Cyclic GFR-binding peptide
GTPGPRSVKMAKVDDSSNVIAAAA

SEQ ID NO: 5231 - protein, 27 aa, Artificial Sequence
  Cyclic GFR-binding peptide
WWFWGGRSVKIAKVDDSSNVIAAAAAA

SEQ ID NO: 5232 - protein, 25 aa, Artificial Sequence
  Cyclic GFR-binding peptide
GTPGPGRPVQMRKIDDSSNVIGGGG

SEQ ID NO: 5233 - protein, 28 aa, Artificial Sequence
  Cyclic GFR-binding peptide
WWFWGGGRPVQIRKIDSSNNVIGGGGGG

SEQ ID NO: 5234 - protein, 26 aa, Artificial Sequence
  Cyclic GFR-binding peptide
GTPGPGGSAISMLYLDDMGVPTAAAA

SEQ ID NO: 5235 - protein, 29 aa, Artificial Sequence
  Cyclic GFR-binding peptide
WWFWGGGGSSLSILFFDKGVVTYAAAAAA

SEQ ID NO: 5236 - protein, 27 aa, Artificial Sequence
  Cyclic GFR-binding peptide
GTPGPGGGNAISVLYFNDKQQIIGGGG

SEQ ID NO: 5237 - protein, 26 aa, Artificial Sequence
  Cyclic GFR-binding peptide
WWFWGSATSVLYYDAANNVVGGGGGG

SEQ ID NO: 5238 - protein, 24 aa, Artificial Sequence
  Cyclic GFR-binding peptide
GTPGPSPISVLYKDSANNVVAAAA

SEQ ID NO: 5239 - protein, 27 aa, Artificial Sequence
  Cyclic GFR-binding peptide
WWFWGGEPISILYLDDSSNVIAAAAAA

SEQ ID NO: 5240 - protein, 25 aa, Artificial Sequence
  Cyclic GFR-binding peptide
GTPGPGSPINMLYFDNGRVLLGGGG

SEQ ID NO: 5241 - protein, 28 aa, Artificial Sequence
  Cyclic GFR-binding peptide
WWFWGGGSPISILYIVGRKPKVGGGGGG

SEQ ID NO: 5242 - protein, 26 aa, Artificial Sequence
  Cyclic GFR-binding peptide
GTPGPGGSPISILFIIGKTPKIAAAA

SEQ ID NO: 5243 - protein, 29 aa, Artificial Sequence
  Cyclic GFR-binding peptide
WWFWGGGGKPLSMLYVVGRTPKVAAAAAA

SEQ ID NO: 5244 - protein, 29 aa, Artificial Sequence
  Cyclic GFR-binding peptide
GTPGPGGGEPLPIVYYRIKPHQGQHGGGG

SEQ ID NO: 5245 - protein, 28 aa, Artificial Sequence
  Cyclic GFR-binding peptide
WWFWGEPLTILYYRIKPHQGQHGGGGGG

SEQ ID NO: 5246 - protein, 26 aa, Artificial Sequence
  Cyclic GFR-binding peptide
GTPGPSNITMQIMRIKPHQGQHAAAA

SEQ ID NO: 5247 - protein, 29 aa, Artificial Sequence
  Cyclic GFR-binding peptide
WWFWGGRSVKVAKVRIKPHQGQHAAAAAA

SEQ ID NO: 5248 - protein, 27 aa, Artificial Sequence
  Cyclic GFR-binding peptide
GTPGPGRPVQVRKIEYVRKKPKLGGGG

SEQ ID NO: 5249 - protein, 20 aa, Artificial Sequence
  Cyclic GFR-binding peptide
GTPGPGGGSAISILYLGGGG

SEQ ID NO: 5250 - protein, 19 aa, Artificial Sequence
  Cyclic GFR-binding peptide
WWFWGSAISVLYLGGGGGG

SEQ ID NO: 5251 - protein, 17 aa, Artificial Sequence
  Cyclic GFR-binding peptide
GTPGPSSLSMLFFAAAA

SEQ ID NO: 5252 - protein, 20 aa, Artificial Sequence
  Cyclic GFR-binding peptide
WWFWGGSSLSVLFFAAAAAA

SEQ ID NO: 5253 - protein, 18 aa, Artificial Sequence
  Cyclic GFR-binding peptide
GTPGPGNAISMLYFGGGG

SEQ ID NO: 5254 - protein, 21 aa, Artificial Sequence
  Cyclic GFR-binding peptide
WWFWGGGNAISILYFGGGGGG

SEQ ID NO: 5255 - protein, 19 aa, Artificial Sequence
  Cyclic GFR-binding peptide
GTPGPGGSATSMLYYAAAA

SEQ ID NO: 5256 - protein, 22 aa, Artificial Sequence
  Cyclic GFR-binding peptide
WWFWGGGGSATSILYYAAAAAA

SEQ ID NO: 5257 - protein, 20 aa, Artificial Sequence
  Cyclic GFR-binding peptide
GTPGPGGGSPISMLYKGGGG

SEQ ID NO: 5258 - protein, 19 aa, Artificial Sequence
  Cyclic GFR-binding peptide
WWFWGSPISILYKGGGGGG

SEQ ID NO: 5259 - protein, 17 aa, Artificial Sequence
  Cyclic GFR-binding peptide
GTPGPEPISMLYLAAAA

SEQ ID NO: 5260 - protein, 20 aa, Artificial Sequence
  Cyclic GFR-binding peptide
WWFWGGEPISVLYLAAAAAA

SEQ ID NO: 5261 - protein, 18 aa, Artificial Sequence
  Cyclic GFR-binding peptide
GTPGPGSPINILYFGGGG

SEQ ID NO: 5262 - protein, 21 aa, Artificial Sequence
  Cyclic GFR-binding peptide
WWFWGGGSPINVLYFGGGGGG

SEQ ID NO: 5263 - protein, 19 aa, Artificial Sequence
  Cyclic GFR-binding peptide
GTPGPGGSPISMLYIAAAA

SEQ ID NO: 5264 - protein, 22 aa, Artificial Sequence
  Cyclic GFR-binding peptide
WWFWGGGGSPISVLYIAAAAAA

SEQ ID NO: 5265 - protein, 20 aa, Artificial Sequence
  Cyclic GFR-binding peptide
GTPGPGGGSPISMLFIGGGG

SEQ ID NO: 5266 - protein, 19 aa, Artificial Sequence
  Cyclic GFR-binding peptide
WWFWGSPISVLFIGGGGGG

SEQ ID NO: 5267 - protein, 17 aa, Artificial Sequence
  Cyclic GFR-binding peptide
GTPGPKPLSILYVAAAA

SEQ ID NO: 5268 - protein, 20 aa, Artificial Sequence
  Cyclic GFR-binding peptide
WWFWGGKPLSVLYVAAAAAA

SEQ ID NO: 5269 - protein, 18 aa, Artificial Sequence
  Cyclic GFR-binding peptide
GTPGPGEPLPMVYYGGGG

SEQ ID NO: 5270 - protein, 21 aa, Artificial Sequence
  Cyclic GFR-binding peptide
WWFWGGGEPLPVVYYGGGGGG

SEQ ID NO: 5271 - protein, 19 aa, Artificial Sequence
  Cyclic GFR-binding peptide
GTPGPGGEPLTMLYYAAAA

SEQ ID NO: 5272 - protein, 22 aa, Artificial Sequence
  Cyclic GFR-binding peptide
WWFWGGGGEPLTVLYYAAAAAA

SEQ ID NO: 5273 - protein, 20 aa, Artificial Sequence
  Cyclic GFR-binding peptide
GTPGPGGGSNITIQIMGGGG

SEQ ID NO: 5274 - protein, 19 aa, Artificial Sequence
  Cyclic GFR-binding peptide
WWFWGSNITVQIMGGGGGG

SEQ ID NO: 5275 - protein, 17 aa, Artificial Sequence
  Cyclic GFR-binding peptide
GTPGPRSVKMAKVAAAA

SEQ ID NO: 5276 - protein, 20 aa, Artificial Sequence
  Cyclic GFR-binding peptide
WWFWGGRSVKIAKVAAAAAA

SEQ ID NO: 5277 - protein, 18 aa, Artificial Sequence
  Cyclic GFR-binding peptide
GTPGPGRPVQMRKIGGGG

SEQ ID NO: 5278 - protein, 21 aa, Artificial Sequence
  Cyclic GFR-binding peptide
WWFWGGGRPVQIRKIGGGGGG

SEQ ID NO: 5279 - protein, 19 aa, Artificial Sequence
  Cyclic GFR-binding peptide
GTPGPGGSAISMLYLAAAA

SEQ ID NO: 5280 - protein, 22 aa, Artificial Sequence
  Cyclic GFR-binding peptide
WWFWGGGGSSLSILFFAAAAAA

SEQ ID NO: 5281 - protein, 20 aa, Artificial Sequence
  Cyclic GFR-binding peptide
GTPGPGGGNAISVLYFGGGG

SEQ ID NO: 5282 - protein, 19 aa, Artificial Sequence
  Cyclic GFR-binding peptide
WWFWGSATSVLYYGGGGGG

SEQ ID NO: 5283 - protein, 17 aa, Artificial Sequence
  Cyclic GFR-binding peptide
GTPGPSPISVLYKAAAA

SEQ ID NO: 5284 - protein, 20 aa, Artificial Sequence
  Cyclic GFR-binding peptide
WWFWGGEPISILYLAAAAAA

SEQ ID NO: 5285 - protein, 18 aa, Artificial Sequence
  Cyclic GFR-binding peptide
GTPGPGSPINMLYFGGGG

SEQ ID NO: 5286 - protein, 21 aa, Artificial Sequence
  Cyclic GFR-binding peptide
WWFWGGGSPISILYIGGGGGG

SEQ ID NO: 5287 - protein, 19 aa, Artificial Sequence
  Cyclic GFR-binding peptide
GTPGPGGSPISILFIAAAA

SEQ ID NO: 5288 - protein, 22 aa, Artificial Sequence
  Cyclic GFR-binding peptide
WWFWGGGGKPLSMLYVAAAAAA

SEQ ID NO: 5289 - protein, 20 aa, Artificial Sequence
  Cyclic GFR-binding peptide
GTPGPGGGEPLPIVYYGGGG

SEQ ID NO: 5290 - protein, 19 aa, Artificial Sequence
  Cyclic GFR-binding peptide
WWFWGEPLTILYYGGGGGG

SEQ ID NO: 5291 - protein, 17 aa, Artificial Sequence
  Cyclic GFR-binding peptide
GTPGPSNITMQIMAAAA

SEQ ID NO: 5292 - protein, 20 aa, Artificial Sequence
  Cyclic GFR-binding peptide
WWFWGGRSVKVAKVAAAAAA

SEQ ID NO: 5293 - protein, 18 aa, Artificial Sequence
  Cyclic GFR-binding peptide
GTPGPGRPVQVRKIGGGG

SEQ ID NO: 5294 - protein, 15 aa, Artificial Sequence
  Cyclic GFR-binding peptide
SAISILYLGGGGGGG

SEQ ID NO: 5295 - protein, 16 aa, Artificial Sequence
  Cyclic GFR-binding peptide
SAISVLYLGGGGGGGG

SEQ ID NO: 5296 - protein, 15 aa, Artificial Sequence
  Cyclic GFR-binding peptide
SSLSMLFFAAAAAAA

SEQ ID NO: 5297 - protein, 16 aa, Artificial Sequence
  Cyclic GFR-binding peptide
SSLSVLFFAAAAAAAA

SEQ ID NO: 5298 - protein, 15 aa, Artificial Sequence
  Cyclic GFR-binding peptide
NAISMLYFGGGGGGG

SEQ ID NO: 5299 - protein, 16 aa, Artificial Sequence
  Cyclic GFR-binding peptide
NAISILYFGGGGGGGG

SEQ ID NO: 5300 - protein, 15 aa, Artificial Sequence
  Cyclic GFR-binding peptide
SATSMLYYAAAAAAA

SEQ ID NO: 5301 - protein, 16 aa, Artificial Sequence
  Cyclic GFR-binding peptide
SATSILYYAAAAAAAA

SEQ ID NO: 5302 - protein, 15 aa, Artificial Sequence
  Cyclic GFR-binding peptide
SPISMLYKGGGGGGG

SEQ ID NO: 5303 - protein, 16 aa, Artificial Sequence
  Cyclic GFR-binding peptide
SPISILYKGGGGGGGG

SEQ ID NO: 5304 - protein, 15 aa, Artificial Sequence
  Cyclic GFR-binding peptide
EPISMLYLAAAAAAA

SEQ ID NO: 5305 - protein, 16 aa, Artificial Sequence
  Cyclic GFR-binding peptide
EPISVLYLAAAAAAAA

SEQ ID NO: 5306 - protein, 15 aa, Artificial Sequence
  Cyclic GFR-binding peptide
SPINILYFGGGGGGG

SEQ ID NO: 5307 - protein, 16 aa, Artificial Sequence
  Cyclic GFR-binding peptide
SPINVLYFGGGGGGGG

SEQ ID NO: 5308 - protein, 15 aa, Artificial Sequence
  Cyclic GFR-binding peptide
SPISMLYIAAAAAAA

SEQ ID NO: 5309 - protein, 16 aa, Artificial Sequence
  Cyclic GFR-binding peptide
SPISVLYIAAAAAAAA

SEQ ID NO: 5310 - protein, 15 aa, Artificial Sequence
  Cyclic GFR-binding peptide
SPISMLFIGGGGGGG

SEQ ID NO: 5311 - protein, 16 aa, Artificial Sequence
  Cyclic GFR-binding peptide
SPISVLFIGGGGGGGG

SEQ ID NO: 5312 - protein, 15 aa, Artificial Sequence
  Cyclic GFR-binding peptide
KPLSILYVAAAAAAA

SEQ ID NO: 5313 - protein, 16 aa, Artificial Sequence
  Cyclic GFR-binding peptide
KPLSVLYVAAAAAAAA

SEQ ID NO: 5314 - protein, 15 aa, Artificial Sequence
  Cyclic GFR-binding peptide
EPLPMVYYGGGGGGG

SEQ ID NO: 5315 - protein, 16 aa, Artificial Sequence
  Cyclic GFR-binding peptide
EPLPVVYYGGGGGGGG

SEQ ID NO: 5316 - protein, 15 aa, Artificial Sequence
  Cyclic GFR-binding peptide
EPLTMLYYAAAAAAA

SEQ ID NO: 5317 - protein, 16 aa, Artificial Sequence
  Cyclic GFR-binding peptide
EPLTVLYYAAAAAAAA

SEQ ID NO: 5318 - protein, 15 aa, Artificial Sequence
  Cyclic GFR-binding peptide
SNITIQIMGGGGGGG

SEQ ID NO: 5319 - protein, 16 aa, Artificial Sequence
  Cyclic GFR-binding peptide
SNITVQIMGGGGGGGG

SEQ ID NO: 5320 - protein, 15 aa, Artificial Sequence
  Cyclic GFR-binding peptide
RSVKMAKVAAAAAAA

SEQ ID NO: 5321 - protein, 16 aa, Artificial Sequence
  Cyclic GFR-binding peptide
RSVKIAKVAAAAAAAA

SEQ ID NO: 5322 - protein, 15 aa, Artificial Sequence
  Cyclic GFR-binding peptide
RPVQMRKIGGGGGGG

SEQ ID NO: 5323 - protein, 16 aa, Artificial Sequence
  Cyclic GFR-binding peptide
RPVQIRKIGGGGGGGG

SEQ ID NO: 5324 - protein, 15 aa, Artificial Sequence
  Cyclic GFR-binding peptide
SAISMLYLAAAAAAA

SEQ ID NO: 5325 - protein, 16 aa, Artificial Sequence
  Cyclic GFR-binding peptide
SSLSILFFAAAAAAAA

SEQ ID NO: 5326 - protein, 15 aa, Artificial Sequence
  Cyclic GFR-binding peptide
NAISVLYFGGGGGGG

SEQ ID NO: 5327 - protein, 16 aa, Artificial Sequence
  Cyclic GFR-binding peptide
SATSVLYYGGGGGGGG

SEQ ID NO: 5328 - protein, 15 aa, Artificial Sequence
  Cyclic GFR-binding peptide
SPISVLYKAAAAAAA

SEQ ID NO: 5329 - protein, 16 aa, Artificial Sequence
  Cyclic GFR-binding peptide
EPISILYLAAAAAAAA

SEQ ID NO: 5330 - protein, 15 aa, Artificial Sequence
  Cyclic GFR-binding peptide
SPINMLYFGGGGGGG

SEQ ID NO: 5331 - protein, 16 aa, Artificial Sequence
  Cyclic GFR-binding peptide
SPISILYIGGGGGGGG

SEQ ID NO: 5332 - protein, 15 aa, Artificial Sequence
  Cyclic GFR-binding peptide
SPISILFIAAAAAAA

SEQ ID NO: 5333 - protein, 16 aa, Artificial Sequence
  Cyclic GFR-binding peptide
KPLSMLYVAAAAAAAA

SEQ ID NO: 5334 - protein, 15 aa, Artificial Sequence
  Cyclic GFR-binding peptide
EPLPIVYYGGGGGGG

SEQ ID NO: 5335 - protein, 16 aa, Artificial Sequence
  Cyclic GFR-binding peptide
EPLTILYYGGGGGGGG

SEQ ID NO: 5336 - protein, 15 aa, Artificial Sequence
  Cyclic GFR-binding peptide
SNITMQIMAAAAAAA

SEQ ID NO: 5337 - protein, 16 aa, Artificial Sequence
  Cyclic GFR-binding peptide
RSVKVAKVAAAAAAAA

SEQ ID NO: 5338 - protein, 15 aa, Artificial Sequence
  Cyclic GFR-binding peptide
RPVQVRKIGGGGGGG

SEQ ID NO: 5339 - protein, 27 aa, Artificial Sequence
  Cyclic GFR-binding peptide
RIKPHVPTKMSAISMLYLDENEKGGGG

SEQ ID NO: 5340 - protein, 29 aa, Artificial Sequence
  Cyclic GFR-binding peptide
EYVRKVPTKLSAISMLYLDENKNGGGGGG

SEQ ID NO: 5341 - protein, 27 aa, Artificial Sequence
  Cyclic GFR-binding peptide
EIVRKVPTQLSAISMLYLDEYDKAAAA

SEQ ID NO: 5342 - protein, 29 aa, Artificial Sequence
  Cyclic GFR-binding peptide
DENEKVPTRLSAISMLYLDDSSNAAAAAA

SEQ ID NO: 5343 - protein, 27 aa, Artificial Sequence
  Cyclic GFR-binding peptide
DENKNVPTKTSAISMLYLDDSSNGGGG

SEQ ID NO: 5344 - protein, 29 aa, Artificial Sequence
  Cyclic GFR-binding peptide
DEYDKVPTALSAISMLYLDDSSNGGGGGG

SEQ ID NO: 5345 - protein, 27 aa, Artificial Sequence
  Cyclic GFR-binding peptide
DDSSNVPTDLSAISMLYLDSSNNAAAA

SEQ ID NO: 5346 - protein, 29 aa, Artificial Sequence
  Cyclic GFR-binding peptide
DDSSNVPEKMSAISMLYLDDMGVAAAAAA

SEQ ID NO: 5347 - protein, 27 aa, Artificial Sequence
  Cyclic GFR-binding peptide
DDSSNAPTKLSAISMLYLDKGVVGGGG

SEQ ID NO: 5348 - protein, 29 aa, Artificial Sequence
  Cyclic GFR-binding peptide
DSSNNAPTQLSAISMLYLNDKQQGGGGGG

SEQ ID NO: 5349 - protein, 27 aa, Artificial Sequence
  Cyclic GFR-binding peptide
DDMGVTPTKMSAISMLYLDAANNAAAA

SEQ ID NO: 5350 - protein, 29 aa, Artificial Sequence
  Cyclic GFR-binding peptide
DKGVVVPARLSAISMLYLDSANNAAAAAA

SEQ ID NO: 5351 - protein, 27 aa, Artificial Sequence
  Cyclic GFR-binding peptide
NDKQQAPVKTSAISMLYLDDSSNGGGG

SEQ ID NO: 5352 - protein, 29 aa, Artificial Sequence
  Cyclic GFR-binding peptide
DAANNVPQALSAISMLYLDNGRVGGGGGG

SEQ ID NO: 5353 - protein, 27 aa, Artificial Sequence
  Cyclic GFR-binding peptide
DSANNVSQDLSAISMLYLVGRKPAAAA

SEQ ID NO: 5354 - protein, 29 aa, Artificial Sequence
  Cyclic GFR-binding peptide
DDSSNVPQDLSAISMLYLIGKTPAAAAAA

SEQ ID NO: 5355 - protein, 27 aa, Artificial Sequence
  Cyclic GFR-binding peptide
DNGRVSRVHHSAISMLYLVGRTPGGGG

SEQ ID NO: 5356 - protein, 29 aa, Artificial Sequence
  Cyclic GFR-binding peptide
VGRKPTQVQLSAISMLYLRIKPHGGGGGG

SEQ ID NO: 5357 - protein, 27 aa, Artificial Sequence
  Cyclic GFR-binding peptide
IGKTPVPEELSSLSILFFRIKPHAAAA

SEQ ID NO: 5358 - protein, 29 aa, Artificial Sequence
  Cyclic GFR-binding peptide
VGRTPVPEKLSSLSILFFRIKPHAAAAAA

SEQ ID NO: 5359 - protein, 27 aa, Artificial Sequence
  Cyclic GFR-binding peptide
RIKPHVPEQLSSLSILFFRIKPHGGGG

SEQ ID NO: 5360 - protein, 29 aa, Artificial Sequence
  Cyclic GFR-binding peptide
RIKPHVPEKMSSLSILFFEYVRKGGGGGG

SEQ ID NO: 5361 - protein, 27 aa, Artificial Sequence
  Cyclic GFR-binding peptide
RIKPHVPERLSSLSILFFEIVRKAAAA

SEQ ID NO: 5362 - protein, 27 aa, Artificial Sequence
  Cyclic GFR-binding peptide
DENEKVPEKTSSLSILFFDENEKGGGG

SEQ ID NO: 5363 - protein, 29 aa, Artificial Sequence
  Cyclic GFR-binding peptide
DENKNVPEALSSLSILFFDENKNGGGGGG

SEQ ID NO: 5364 - protein, 27 aa, Artificial Sequence
  Cyclic GFR-binding peptide
DEYDKVPEDLSSLSILFFDEYDKAAAA

SEQ ID NO: 5365 - protein, 29 aa, Artificial Sequence
  Cyclic GFR-binding peptide
DDSSNVPTELSSLSILFFDDSSNAAAAAA

SEQ ID NO: 5366 - protein, 27 aa, Artificial Sequence
  Cyclic GFR-binding peptide
DDSSNAPTKLSSLSILFFDDSSNGGGG

SEQ ID NO: 5367 - protein, 29 aa, Artificial Sequence
  Cyclic GFR-binding peptide
DDSSNAPTQLSSLSILFFDDSSNGGGGGG

SEQ ID NO: 5368 - protein, 27 aa, Artificial Sequence
  Cyclic GFR-binding peptide
DSSNNVPTKLSSLSILFFDSSNNAAAA

SEQ ID NO: 5369 - protein, 29 aa, Artificial Sequence
  Cyclic GFR-binding peptide
DDMGVTPTKMSSLSILFFDDMGVAAAAAA

SEQ ID NO: 5370 - protein, 27 aa, Artificial Sequence
  Cyclic GFR-binding peptide
DKGVVVPARLSSLSILFFDKGVVGGGG

SEQ ID NO: 5371 - protein, 29 aa, Artificial Sequence
  Cyclic GFR-binding peptide
NDKQQVPTRLSSLSILFFNDKQQGGGGGG

SEQ ID NO: 5372 - protein, 27 aa, Artificial Sequence
  Cyclic GFR-binding peptide
DAANNAPVKTSSLSILFFDAANNAAAA

SEQ ID NO: 5373 - protein, 29 aa, Artificial Sequence
  Cyclic GFR-binding peptide
DSANNVPQALSSLSILFFDSANNAAAAAA

SEQ ID NO: 5374 - protein, 27 aa, Artificial Sequence
  Cyclic GFR-binding peptide
DDSSNVSQDLSSLSILFFDDSSNGGGG

SEQ ID NO: 5375 - protein, 29 aa, Artificial Sequence
  Cyclic GFR-binding peptide
DNGRVVPQDLSSLSILFFDNGRVGGGGGG

SEQ ID NO: 5376 - protein, 27 aa, Artificial Sequence
  Cyclic GFR-binding peptide
VGRKPVPTEESSLSILFFVGRKPAAAA

SEQ ID NO: 5377 - protein, 29 aa, Artificial Sequence
  Cyclic GFR-binding peptide
IGKTPVPTGQSSLSILFFIGKTPAAAAAA

SEQ ID NO: 5378 - protein, 27 aa, Artificial Sequence
  Cyclic GFR-binding peptide
VGRTPSRVHHSSLSILFFVGRTPGGGG

SEQ ID NO: 5379 - protein, 29 aa, Artificial Sequence
  Cyclic GFR-binding peptide
RIKPHTQVQLSSLSILFFRIKPHGGGGGG

SEQ ID NO: 5380 - protein, 27 aa, Artificial Sequence
  Cyclic GFR-binding peptide
RIKPHAPTELNAISVLYFRIKPHAAAA

SEQ ID NO: 5381 - protein, 29 aa, Artificial Sequence
  Cyclic GFR-binding peptide
RIKPHAPTKMNAISVLYFRIKPHAAAAAA

SEQ ID NO: 5382 - protein, 27 aa, Artificial Sequence
  Cyclic GFR-binding peptide
RIKPHAPTKLNAISVLYFRIKPHGGGG

SEQ ID NO: 5383 - protein, 29 aa, Artificial Sequence
  Cyclic GFR-binding peptide
EYVRKAPTRLNAISVLYFEYVRKGGGGGG

SEQ ID NO: 5384 - protein, 27 aa, Artificial Sequence
  Cyclic GFR-binding peptide
EIVRKAPTKTNAISVLYFEIVRKAAAA

SEQ ID NO: 5385 - protein, 27 aa, Artificial Sequence
  Cyclic GFR-binding peptide
DENEKAPTALNAISVLYFDENEKGGGG

SEQ ID NO: 5386 - protein, 29 aa, Artificial Sequence
  Cyclic GFR-binding peptide
DENKNAPTDLNAISVLYFDENKNGGGGGG

SEQ ID NO: 5387 - protein, 27 aa, Artificial Sequence
  Cyclic GFR-binding peptide
DEYDKVPTELNAISVLYFDEYDKAAAA

SEQ ID NO: 5388 - protein, 29 aa, Artificial Sequence
  Cyclic GFR-binding peptide
DDSSNVPEKMNAISVLYFDDSSNAAAAAA

SEQ ID NO: 5389 - protein, 27 aa, Artificial Sequence
  Cyclic GFR-binding peptide
DDSSNVPTKLNAISVLYFDDSSNGGGG

SEQ ID NO: 5390 - protein, 29 aa, Artificial Sequence
  Cyclic GFR-binding peptide
DDSSNTPTKMNAISVLYFDDSSNGGGGGG

SEQ ID NO: 5391 - protein, 27 aa, Artificial Sequence
  Cyclic GFR-binding peptide
DSSNNVPARLNAISVLYFDSSNNAAAA

SEQ ID NO: 5392 - protein, 29 aa, Artificial Sequence
  Cyclic GFR-binding peptide
DDMGVVPTRLNAISVLYFDDMGVAAAAAA

SEQ ID NO: 5393 - protein, 27 aa, Artificial Sequence
  Cyclic GFR-binding peptide
DKGVVAPVKTNAISVLYFDKGVVGGGG

SEQ ID NO: 5394 - protein, 29 aa, Artificial Sequence
  Cyclic GFR-binding peptide
NDKQQVPQALNAISVLYFNDKQQGGGGGG

SEQ ID NO: 5395 - protein, 27 aa, Artificial Sequence
  Cyclic GFR-binding peptide
DAANNVSQDLNAISVLYFDAANNAAAA

SEQ ID NO: 5396 - protein, 29 aa, Artificial Sequence
  Cyclic GFR-binding peptide
DSANNVPQDLNAISVLYFDSANNAAAAAA

SEQ ID NO: 5397 - protein, 27 aa, Artificial Sequence
  Cyclic GFR-binding peptide
DDSSNVPTEENAISVLYFDDSSNGGGG

SEQ ID NO: 5398 - protein, 29 aa, Artificial Sequence
  Cyclic GFR-binding peptide
DNGRVVPTGQNAISVLYFDNGRVGGGGGG

SEQ ID NO: 5399 - protein, 27 aa, Artificial Sequence
  Cyclic GFR-binding peptide
VGRKPSRVHHNAISVLYFVGRKPAAAA

SEQ ID NO: 5400 - protein, 29 aa, Artificial Sequence
  Cyclic GFR-binding peptide
IGKTPTQVQLNAISVLYFIGKTPAAAAAA

SEQ ID NO: 5401 - protein, 27 aa, Artificial Sequence
  Cyclic GFR-binding peptide
VGRTPAPTELSATSVLYYVGRTPGGGG

SEQ ID NO: 5402 - protein, 29 aa, Artificial Sequence
  Cyclic GFR-binding peptide
RIKPHAPTKMSATSVLYYRIKPHGGGGGG

SEQ ID NO: 5403 - protein, 27 aa, Artificial Sequence
  Cyclic GFR-binding peptide
RIKPHAPTKLSATSVLYYRIKPHAAAA

SEQ ID NO: 5404 - protein, 29 aa, Artificial Sequence
  Cyclic GFR-binding peptide
RIKPHAPTQLSATSVLYYRIKPHAAAAAA

SEQ ID NO: 5405 - protein, 27 aa, Artificial Sequence
  Cyclic GFR-binding peptide
RIKPHAPTRLSATSVLYYRIKPHGGGG

SEQ ID NO: 5406 - protein, 29 aa, Artificial Sequence
  Cyclic GFR-binding peptide
EYVRKAPTKTSATSVLYYEYVRKGGGGGG

SEQ ID NO: 5407 - protein, 27 aa, Artificial Sequence
  Cyclic GFR-binding peptide
EIVRKAPTALSATSVLYYEIVRKAAAA

SEQ ID NO: 5408 - protein, 27 aa, Artificial Sequence
  Cyclic GFR-binding peptide
DENEKAPTDLSATSVLYYDENEKGGGG

SEQ ID NO: 5409 - protein, 29 aa, Artificial Sequence
  Cyclic GFR-binding peptide
DENKNVPTELSATSVLYYDENKNGGGGGG

SEQ ID NO: 5410 - protein, 27 aa, Artificial Sequence
  Cyclic GFR-binding peptide
DEYDKVPEKMSATSVLYYDEYDKAAAA

SEQ ID NO: 5411 - protein, 29 aa, Artificial Sequence
  Cyclic GFR-binding peptide
DDSSNVPTKLSATSVLYYDDSSNAAAAAA

SEQ ID NO: 5412 - protein, 27 aa, Artificial Sequence
  Cyclic GFR-binding peptide
DDSSNTPTKMSATSVLYYDDSSNGGGG

SEQ ID NO: 5413 - protein, 29 aa, Artificial Sequence
  Cyclic GFR-binding peptide
DDSSNVPARLSATSVLYYDDSSNGGGGGG

SEQ ID NO: 5414 - protein, 27 aa, Artificial Sequence
  Cyclic GFR-binding peptide
DSSNNVPTRLSATSVLYYDSSNNAAAA

SEQ ID NO: 5415 - protein, 29 aa, Artificial Sequence
  Cyclic GFR-binding peptide
DDMGVAPVKTSATSVLYYDDMGVAAAAAA

SEQ ID NO: 5416 - protein, 27 aa, Artificial Sequence
  Cyclic GFR-binding peptide
DKGVVVPQALSATSVLYYDKGVVGGGG

SEQ ID NO: 5417 - protein, 29 aa, Artificial Sequence
  Cyclic GFR-binding peptide
NDKQQVSQDLSATSVLYYNDKQQGGGGGG

SEQ ID NO: 5418 - protein, 27 aa, Artificial Sequence
  Cyclic GFR-binding peptide
DAANNVPQDLSATSVLYYDAANNAAAA

SEQ ID NO: 5419 - protein, 29 aa, Artificial Sequence
  Cyclic GFR-binding peptide
DSANNVPTEESATSVLYYDSANNAAAAAA

SEQ ID NO: 5420 - protein, 27 aa, Artificial Sequence
  Cyclic GFR-binding peptide
DDSSNVPTGQSATSVLYYDDSSNGGGG

SEQ ID NO: 5421 - protein, 29 aa, Artificial Sequence
  Cyclic GFR-binding peptide
DNGRVSRVHHSATSVLYYDNGRVGGGGGG

SEQ ID NO: 5422 - protein, 27 aa, Artificial Sequence
  Cyclic GFR-binding peptide
VGRKPTQVQLSATSVLYYVGRKPAAAA

SEQ ID NO: 5423 - protein, 29 aa, Artificial Sequence
  Cyclic GFR-binding peptide
IGKTPVPTELSPISVLYKIGKTPAAAAAA

SEQ ID NO: 5424 - protein, 27 aa, Artificial Sequence
  Cyclic GFR-binding peptide
VGRTPVPTKMSPISVLYKVGRTPGGGG

SEQ ID NO: 5425 - protein, 29 aa, Artificial Sequence
  Cyclic GFR-binding peptide
RIKPHVPTKLSPISVLYKRIKPHGGGGGG

SEQ ID NO: 5426 - protein, 27 aa, Artificial Sequence
  Cyclic GFR-binding peptide
RIKPHVPTQLSPISVLYKRIKPHAAAA

SEQ ID NO: 5427 - protein, 29 aa, Artificial Sequence
  Cyclic GFR-binding peptide
RIKPHVPTRLSPISVLYKRIKPHAAAAAA

SEQ ID NO: 5428 - protein, 27 aa, Artificial Sequence
  Cyclic GFR-binding peptide
RIKPHVPTKTSPISVLYKRIKPHGGGG

SEQ ID NO: 5429 - protein, 29 aa, Artificial Sequence
  Cyclic GFR-binding peptide
EYVRKVPTALSPISVLYKEYVRKGGGGGG

SEQ ID NO: 5430 - protein, 27 aa, Artificial Sequence
  Cyclic GFR-binding peptide
EIVRKVPTDLSPISVLYKEIVRKAAAA

SEQ ID NO: 5431 - protein, 27 aa, Artificial Sequence
  Cyclic GFR-binding peptide
DENEKVPEKMSPISVLYKDENEKGGGG

SEQ ID NO: 5432 - protein, 29 aa, Artificial Sequence
  Cyclic GFR-binding peptide
DENKNAPTKLSPISVLYKDENKNGGGGGG

SEQ ID NO: 5433 - protein, 27 aa, Artificial Sequence
  Cyclic GFR-binding peptide
DEYDKAPTQLSPISVLYKDEYDKAAAA

SEQ ID NO: 5434 - protein, 29 aa, Artificial Sequence
  Cyclic GFR-binding peptide
DDSSNTPTKMSPISVLYKDDSSNAAAAAA

SEQ ID NO: 5435 - protein, 27 aa, Artificial Sequence
  Cyclic GFR-binding peptide
DDSSNVPARLSPISVLYKDDSSNGGGG

SEQ ID NO: 5436 - protein, 29 aa, Artificial Sequence
  Cyclic GFR-binding peptide
DDSSNAPVKTSPISVLYKDDSSNGGGGGG

SEQ ID NO: 5437 - protein, 27 aa, Artificial Sequence
  Cyclic GFR-binding peptide
DSSNNVPQALSPISVLYKDSSNNAAAA

SEQ ID NO: 5438 - protein, 29 aa, Artificial Sequence
  Cyclic GFR-binding peptide
DDMGVVSQDLSPISVLYKDDMGVAAAAAA

SEQ ID NO: 5439 - protein, 27 aa, Artificial Sequence
  Cyclic GFR-binding peptide
DKGVVVPQDLSPISVLYKDKGVVGGGG

SEQ ID NO: 5440 - protein, 29 aa, Artificial Sequence
  Cyclic GFR-binding peptide
NDKQQSRVHHSPISVLYKNDKQQGGGGGG

SEQ ID NO: 5441 - protein, 27 aa, Artificial Sequence
  Cyclic GFR-binding peptide
DAANNTQVQLSPISVLYKDAANNAAAA

SEQ ID NO: 5442 - protein, 29 aa, Artificial Sequence
  Cyclic GFR-binding peptide
DSANNVPTELEPISILYLDSANNAAAAAA

SEQ ID NO: 5443 - protein, 27 aa, Artificial Sequence
  Cyclic GFR-binding peptide
DDSSNVPTKMEPISILYLDDSSNGGGG

SEQ ID NO: 5444 - protein, 29 aa, Artificial Sequence
  Cyclic GFR-binding peptide
DNGRVVPTKLEPISILYLDNGRVGGGGGG

SEQ ID NO: 5445 - protein, 27 aa, Artificial Sequence
  Cyclic GFR-binding peptide
VGRKPVPTQLEPISILYLVGRKPAAAA

SEQ ID NO: 5446 - protein, 29 aa, Artificial Sequence
  Cyclic GFR-binding peptide
IGKTPVPTRLEPISILYLIGKTPAAAAAA

SEQ ID NO: 5447 - protein, 27 aa, Artificial Sequence
  Cyclic GFR-binding peptide
VGRTPVPTKTEPISILYLVGRTPGGGG

SEQ ID NO: 5448 - protein, 29 aa, Artificial Sequence
  Cyclic GFR-binding peptide
RIKPHVPTALEPISILYLRIKPHGGGGGG

SEQ ID NO: 5449 - protein, 27 aa, Artificial Sequence
  Cyclic GFR-binding peptide
RIKPHVPTDLEPISILYLRIKPHAAAA

SEQ ID NO: 5450 - protein, 29 aa, Artificial Sequence
  Cyclic GFR-binding peptide
RIKPHVPEKMEPISILYLRIKPHAAAAAA

SEQ ID NO: 5451 - protein, 27 aa, Artificial Sequence
  Cyclic GFR-binding peptide
RIKPHAPTKLEPISILYLRIKPHGGGG

SEQ ID NO: 5452 - protein, 29 aa, Artificial Sequence
  Cyclic GFR-binding peptide
EYVRKAPTQLEPISILYLEYVRKGGGGGG

SEQ ID NO: 5453 - protein, 27 aa, Artificial Sequence
  Cyclic GFR-binding peptide
EIVRKTPTKMEPISILYLEIVRKAAAA

SEQ ID NO: 5454 - protein, 27 aa, Artificial Sequence
  Cyclic GFR-binding peptide
DENEKVPARLEPISILYLDENEKGGGG

SEQ ID NO: 5455 - protein, 29 aa, Artificial Sequence
  Cyclic GFR-binding peptide
DENKNAPVKTEPISILYLDENKNGGGGGG

SEQ ID NO: 5456 - protein, 27 aa, Artificial Sequence
  Cyclic GFR-binding peptide
DEYDKVPQALEPISILYLDEYDKAAAA

SEQ ID NO: 5457 - protein, 29 aa, Artificial Sequence
  Cyclic GFR-binding peptide
DDSSNVSQDLEPISILYLDDSSNAAAAAA

SEQ ID NO: 5458 - protein, 27 aa, Artificial Sequence
  Cyclic GFR-binding peptide
DDSSNVPQDLEPISILYLDDSSNGGGG

SEQ ID NO: 5459 - protein, 29 aa, Artificial Sequence
  Cyclic GFR-binding peptide
DDSSNSRVHHEPISILYLDDSSNGGGGGG

SEQ ID NO: 5460 - protein, 27 aa, Artificial Sequence
  Cyclic GFR-binding peptide
DSSNNTQVQLEPISILYLDSSNNAAAA

SEQ ID NO: 5461 - protein, 29 aa, Artificial Sequence
  Cyclic GFR-binding peptide
DDMGVTPTELSPINMLYFDDMGVAAAAAA

SEQ ID NO: 5462 - protein, 27 aa, Artificial Sequence
  Cyclic GFR-binding peptide
DKGVVTPTKMSPINMLYFDKGVVGGGG

SEQ ID NO: 5463 - protein, 29 aa, Artificial Sequence
  Cyclic GFR-binding peptide
NDKQQTPTKLSPINMLYFNDKQQGGGGGG

SEQ ID NO: 5464 - protein, 27 aa, Artificial Sequence
  Cyclic GFR-binding peptide
DAANNTPTQLSPINMLYFDAANNAAAA

SEQ ID NO: 5465 - protein, 29 aa, Artificial Sequence
  Cyclic GFR-binding peptide
DSANNTPTRLSPINMLYFDSANNAAAAAA

SEQ ID NO: 5466 - protein, 27 aa, Artificial Sequence
  Cyclic GFR-binding peptide
DDSSNTPTKTSPINMLYFDDSSNGGGG

SEQ ID NO: 5467 - protein, 29 aa, Artificial Sequence
  Cyclic GFR-binding peptide
DNGRVTPTALSPINMLYFDNGRVGGGGGG

SEQ ID NO: 5468 - protein, 27 aa, Artificial Sequence
  Cyclic GFR-binding peptide
VGRKPTPTDLSPINMLYFVGRKPAAAA

SEQ ID NO: 5469 - protein, 29 aa, Artificial Sequence
  Cyclic GFR-binding peptide
IGKTPVPTELSPINMLYFIGKTPAAAAAA

SEQ ID NO: 5470 - protein, 27 aa, Artificial Sequence
  Cyclic GFR-binding peptide
VGRTPVPEKMSPINMLYFVGRTPGGGG

SEQ ID NO: 5471 - protein, 29 aa, Artificial Sequence
  Cyclic GFR-binding peptide
RIKPHAPTKLSPINMLYFRIKPHGGGGGG

SEQ ID NO: 5472 - protein, 27 aa, Artificial Sequence
  Cyclic GFR-binding peptide
RIKPHAPTQLSPINMLYFRIKPHAAAA

SEQ ID NO: 5473 - protein, 29 aa, Artificial Sequence
  Cyclic GFR-binding peptide
RIKPHVPTKLSPINMLYFRIKPHAAAAAA

SEQ ID NO: 5474 - protein, 27 aa, Artificial Sequence
  Cyclic GFR-binding peptide
RIKPHVPARLSPINMLYFRIKPHGGGG

SEQ ID NO: 5475 - protein, 29 aa, Artificial Sequence
  Cyclic GFR-binding peptide
EYVRKVPTRLSPINMLYFEYVRKGGGGGG

SEQ ID NO: 5476 - protein, 27 aa, Artificial Sequence
  Cyclic GFR-binding peptide
EIVRKAPVKTSPINMLYFEIVRKAAAA

SEQ ID NO: 5477 - protein, 27 aa, Artificial Sequence
  Cyclic GFR-binding peptide
DENEKVPQALSPINMLYFDENEKGGGG

SEQ ID NO: 5478 - protein, 29 aa, Artificial Sequence
  Cyclic GFR-binding peptide
DENKNVSQDLSPINMLYFDENKNGGGGGG

SEQ ID NO: 5479 - protein, 27 aa, Artificial Sequence
  Cyclic GFR-binding peptide
DEYDKVPQDLSPINMLYFDEYDKAAAA

SEQ ID NO: 5480 - protein, 29 aa, Artificial Sequence
  Cyclic GFR-binding peptide
DDSSNVPTEESPINMLYFDDSSNAAAAAA

SEQ ID NO: 5481 - protein, 27 aa, Artificial Sequence
  Cyclic GFR-binding peptide
DDSSNVPTGQSPINMLYFDDSSNGGGG

SEQ ID NO: 5482 - protein, 29 aa, Artificial Sequence
  Cyclic GFR-binding peptide
DDSSNSRVHHSPINMLYFDDSSNGGGGGG

SEQ ID NO: 5483 - protein, 27 aa, Artificial Sequence
  Cyclic GFR-binding peptide
DSSNNTQVQLSPINMLYFDSSNNAAAA

SEQ ID NO: 5484 - protein, 29 aa, Artificial Sequence
  Cyclic GFR-binding peptide
DDMGVVPAELSPISILYIDDMGVAAAAAA

SEQ ID NO: 5485 - protein, 27 aa, Artificial Sequence
  Cyclic GFR-binding peptide
DKGVVVPAKMSPISILYIDKGVVGGGG

SEQ ID NO: 5486 - protein, 29 aa, Artificial Sequence
  Cyclic GFR-binding peptide
NDKQQVPAKLSPISILYINDKQQGGGGGG

SEQ ID NO: 5487 - protein, 27 aa, Artificial Sequence
  Cyclic GFR-binding peptide
DAANNVPAQLSPISILYIDAANNAAAA

SEQ ID NO: 5488 - protein, 29 aa, Artificial Sequence
  Cyclic GFR-binding peptide
DSANNVPARLSPISILYIDSANNAAAAAA

SEQ ID NO: 5489 - protein, 27 aa, Artificial Sequence
  Cyclic GFR-binding peptide
DDSSNVPAKTSPISILYIDDSSNGGGG

SEQ ID NO: 5490 - protein, 29 aa, Artificial Sequence
  Cyclic GFR-binding peptide
DNGRVVPAALSPISILYIDNGRVGGGGGG

SEQ ID NO: 5491 - protein, 27 aa, Artificial Sequence
  Cyclic GFR-binding peptide
VGRKPVPADLSPISILYIVGRKPAAAA

SEQ ID NO: 5492 - protein, 29 aa, Artificial Sequence
  Cyclic GFR-binding peptide
IGKTPVPTELSPISILYIIGKTPAAAAAA

SEQ ID NO: 5493 - protein, 27 aa, Artificial Sequence
  Cyclic GFR-binding peptide
VGRTPVPEKMSPISILYIVGRTPGGGG

SEQ ID NO: 5494 - protein, 29 aa, Artificial Sequence
  Cyclic GFR-binding peptide
RIKPHAPTKLSPISILYIRIKPHGGGGGG

SEQ ID NO: 5495 - protein, 27 aa, Artificial Sequence
  Cyclic GFR-binding peptide
RIKPHAPTQLSPISILYIRIKPHAAAA

SEQ ID NO: 5496 - protein, 29 aa, Artificial Sequence
  Cyclic GFR-binding peptide
RIKPHVPTKLSPISILYIRIKPHAAAAAA

SEQ ID NO: 5497 - protein, 27 aa, Artificial Sequence
  Cyclic GFR-binding peptide
RIKPHTPTKMSPISILYIRIKPHGGGG

SEQ ID NO: 5498 - protein, 29 aa, Artificial Sequence
  Cyclic GFR-binding peptide
EYVRKVPTRLSPISILYIEYVRKGGGGGG

SEQ ID NO: 5499 - protein, 27 aa, Artificial Sequence
  Cyclic GFR-binding peptide
EIVRKAPVKTSPISILYIEIVRKAAAA

SEQ ID NO: 5500 - protein, 27 aa, Artificial Sequence
  Cyclic GFR-binding peptide
DENEKVPQALSPISILYIDENEKGGGG

SEQ ID NO: 5501 - protein, 29 aa, Artificial Sequence
  Cyclic GFR-binding peptide
DENKNVSQDLSPISILYIDENKNGGGGGG

SEQ ID NO: 5502 - protein, 27 aa, Artificial Sequence
  Cyclic GFR-binding peptide
DEYDKVPQDLSPISILYIDEYDKAAAA

SEQ ID NO: 5503 - protein, 29 aa, Artificial Sequence
  Cyclic GFR-binding peptide
DDSSNVPTEESPISILYIDDSSNAAAAAA

SEQ ID NO: 5504 - protein, 27 aa, Artificial Sequence
  Cyclic GFR-binding peptide
DDSSNVPTGQSPISILYIDDSSNGGGG

SEQ ID NO: 5505 - protein, 29 aa, Artificial Sequence
  Cyclic GFR-binding peptide
DDSSNSRVHHSPISILYIDDSSNGGGGGG

SEQ ID NO: 5506 - protein, 27 aa, Artificial Sequence
  Cyclic GFR-binding peptide
DSSNNTQVQLSPISILYIDSSNNAAAA

SEQ ID NO: 5507 - protein, 29 aa, Artificial Sequence
  Cyclic GFR-binding peptide
DDMGVVPTELSPISILFIDDMGVAAAAAA

SEQ ID NO: 5508 - protein, 27 aa, Artificial Sequence
  Cyclic GFR-binding peptide
DKGVVVPTKMSPISILFIDKGVVGGGG

SEQ ID NO: 5509 - protein, 29 aa, Artificial Sequence
  Cyclic GFR-binding peptide
NDKQQVPTKLSPISILFINDKQQGGGGGG

SEQ ID NO: 5510 - protein, 27 aa, Artificial Sequence
  Cyclic GFR-binding peptide
DAANNVPTQLSPISILFIDAANNAAAA

SEQ ID NO: 5511 - protein, 29 aa, Artificial Sequence
  Cyclic GFR-binding peptide
DSANNVPTRLSPISILFIDSANNAAAAAA

SEQ ID NO: 5512 - protein, 27 aa, Artificial Sequence
  Cyclic GFR-binding peptide
DDSSNVPTKTSPISILFIDDSSNGGGG

SEQ ID NO: 5513 - protein, 29 aa, Artificial Sequence
  Cyclic GFR-binding peptide
DNGRVVPTALSPISILFIDNGRVGGGGGG

SEQ ID NO: 5514 - protein, 27 aa, Artificial Sequence
  Cyclic GFR-binding peptide
VGRKPVPTDLSPISILFIVGRKPAAAA

SEQ ID NO: 5515 - protein, 29 aa, Artificial Sequence
  Cyclic GFR-binding peptide
IGKTPVPEKMSPISILFIIGKTPAAAAAA

SEQ ID NO: 5516 - protein, 27 aa, Artificial Sequence
  Cyclic GFR-binding peptide
VGRTPAPTKLSPISILFIVGRTPGGGG

SEQ ID NO: 5517 - protein, 29 aa, Artificial Sequence
  Cyclic GFR-binding peptide
RIKPHAPTQLSPISILFIRIKPHGGGGGG

SEQ ID NO: 5518 - protein, 27 aa, Artificial Sequence
  Cyclic GFR-binding peptide
RIKPHTPTKMSPISILFIRIKPHAAAA

SEQ ID NO: 5519 - protein, 29 aa, Artificial Sequence
  Cyclic GFR-binding peptide
RIKPHVPARLSPISILFIRIKPHAAAAAA

SEQ ID NO: 5520 - protein, 27 aa, Artificial Sequence
  Cyclic GFR-binding peptide
RIKPHAPVKTSPISILFIRIKPHGGGG

SEQ ID NO: 5521 - protein, 29 aa, Artificial Sequence
  Cyclic GFR-binding peptide
EYVRKVPQALSPISILFIEYVRKGGGGGG

SEQ ID NO: 5522 - protein, 27 aa, Artificial Sequence
  Cyclic GFR-binding peptide
EIVRKVSQDLSPISILFIEIVRKAAAA

SEQ ID NO: 5523 - protein, 27 aa, Artificial Sequence
  Cyclic GFR-binding peptide
DENEKVPQDLSPISILFIDENEKGGGG

SEQ ID NO: 5524 - protein, 29 aa, Artificial Sequence
  Cyclic GFR-binding peptide
DENKNSRVHHSPISILFIDENKNGGGGGG

SEQ ID NO: 5525 - protein, 27 aa, Artificial Sequence
  Cyclic GFR-binding peptide
DEYDKTQVQLSPISILFIDEYDKAAAA

SEQ ID NO: 5526 - protein, 29 aa, Artificial Sequence
  Cyclic GFR-binding peptide
DDSSNAPVELKPLSMLYVDDSSNAAAAAA

SEQ ID NO: 5527 - protein, 27 aa, Artificial Sequence
  Cyclic GFR-binding peptide
DDSSNAPVKMKPLSMLYVDDSSNGGGG

SEQ ID NO: 5528 - protein, 29 aa, Artificial Sequence
  Cyclic GFR-binding peptide
DDSSNAPVKLKPLSMLYVDDSSNGGGGGG

SEQ ID NO: 5529 - protein, 27 aa, Artificial Sequence
  Cyclic GFR-binding peptide
DSSNNAPVQLKPLSMLYVDSSNNAAAA

SEQ ID NO: 5530 - protein, 29 aa, Artificial Sequence
  Cyclic GFR-binding peptide
DDMGVAPVRLKPLSMLYVDDMGVAAAAAA

SEQ ID NO: 5531 - protein, 27 aa, Artificial Sequence
  Cyclic GFR-binding peptide
DKGVVAPVALKPLSMLYVDKGVVGGGG

SEQ ID NO: 5532 - protein, 29 aa, Artificial Sequence
  Cyclic GFR-binding peptide
NDKQQAPVDLKPLSMLYVNDKQQGGGGGG

SEQ ID NO: 5533 - protein, 27 aa, Artificial Sequence
  Cyclic GFR-binding peptide
DAANNVPTELKPLSMLYVDAANNAAAA

SEQ ID NO: 5534 - protein, 29 aa, Artificial Sequence
  Cyclic GFR-binding peptide
DSANNVPEKMKPLSMLYVDSANNAAAAAA

SEQ ID NO: 5535 - protein, 27 aa, Artificial Sequence
  Cyclic GFR-binding peptide
DDSSNAPTKLKPLSMLYVDDSSNGGGG

SEQ ID NO: 5536 - protein, 29 aa, Artificial Sequence
  Cyclic GFR-binding peptide
DNGRVAPTQLKPLSMLYVDNGRVGGGGGG

SEQ ID NO: 5537 - protein, 27 aa, Artificial Sequence
  Cyclic GFR-binding peptide
VGRKPVPTKLKPLSMLYVVGRKPAAAA

SEQ ID NO: 5538 - protein, 29 aa, Artificial Sequence
  Cyclic GFR-binding peptide
IGKTPTPTKMKPLSMLYVIGKTPAAAAAA

SEQ ID NO: 5539 - protein, 27 aa, Artificial Sequence
  Cyclic GFR-binding peptide
DENEKVPARLKPLSMLYVVGRTPGGGG

SEQ ID NO: 5540 - protein, 29 aa, Artificial Sequence
  Cyclic GFR-binding peptide
DENKNVPTRLKPLSMLYVRIKPHGGGGGG

SEQ ID NO: 5541 - protein, 27 aa, Artificial Sequence
  Cyclic GFR-binding peptide
DEYDKVPQALKPLSMLYVRIKPHAAAA

SEQ ID NO: 5542 - protein, 29 aa, Artificial Sequence
  Cyclic GFR-binding peptide
DDSSNVSQDLKPLSMLYVRIKPHAAAAAA

SEQ ID NO: 5543 - protein, 27 aa, Artificial Sequence
  Cyclic GFR-binding peptide
DDSSNVPQDLKPLSMLYVRIKPHGGGG

SEQ ID NO: 5544 - protein, 29 aa, Artificial Sequence
  Cyclic GFR-binding peptide
DDSSNVPTEEKPLSMLYVEYVRKGGGGGG

SEQ ID NO: 5545 - protein, 27 aa, Artificial Sequence
  Cyclic GFR-binding peptide
DSSNNVPTGQKPLSMLYVEIVRKAAAA

SEQ ID NO: 5546 - protein, 27 aa, Artificial Sequence
  Cyclic GFR-binding peptide
DDMGVSRVHHKPLSMLYVDENEKGGGG

SEQ ID NO: 5547 - protein, 29 aa, Artificial Sequence
  Cyclic GFR-binding peptide
DKGVVTQVQLKPLSMLYVDENKNGGGGGG

SEQ ID NO: 5548 - protein, 27 aa, Artificial Sequence
  Cyclic GFR-binding peptide
NDKQQVPQELEPLPIVYYDEYDKAAAA

SEQ ID NO: 5549 - protein, 29 aa, Artificial Sequence
  Cyclic GFR-binding peptide
DAANNVPQKMEPLPIVYYDDSSNAAAAAA

SEQ ID NO: 5550 - protein, 27 aa, Artificial Sequence
  Cyclic GFR-binding peptide
DSANNVPQKLEPLPIVYYDDSSNGGGG

SEQ ID NO: 5551 - protein, 29 aa, Artificial Sequence
  Cyclic GFR-binding peptide
DDSSNVPQQLEPLPIVYYDDSSNGGGGGG

SEQ ID NO: 5552 - protein, 27 aa, Artificial Sequence
  Cyclic GFR-binding peptide
DNGRVVPQRLEPLPIVYYDSSNNAAAA

SEQ ID NO: 5553 - protein, 29 aa, Artificial Sequence
  Cyclic GFR-binding peptide
VGRKPVPQKTEPLPIVYYDDMGVAAAAAA

SEQ ID NO: 5554 - protein, 27 aa, Artificial Sequence
  Cyclic GFR-binding peptide
IGKTPVPQDLEPLPIVYYDKGVVGGGG

SEQ ID NO: 5555 - protein, 29 aa, Artificial Sequence
  Cyclic GFR-binding peptide
VGRTPVPTELEPLPIVYYNDKQQGGGGGG

SEQ ID NO: 5556 - protein, 27 aa, Artificial Sequence
  Cyclic GFR-binding peptide
RIKPHVPEKMEPLPIVYYDAANNAAAA

SEQ ID NO: 5557 - protein, 29 aa, Artificial Sequence
  Cyclic GFR-binding peptide
RIKPHAPTKLEPLPIVYYDSANNAAAAAA

SEQ ID NO: 5558 - protein, 27 aa, Artificial Sequence
  Cyclic GFR-binding peptide
RIKPHAPTQLEPLPIVYYDDSSNGGGG

SEQ ID NO: 5559 - protein, 29 aa, Artificial Sequence
  Cyclic GFR-binding peptide
RIKPHVPTKLEPLPIVYYDNGRVGGGGGG

SEQ ID NO: 5560 - protein, 27 aa, Artificial Sequence
  Cyclic GFR-binding peptide
EYVRKTPTKMEPLPIVYYVGRKPAAAA

SEQ ID NO: 5561 - protein, 29 aa, Artificial Sequence
  Cyclic GFR-binding peptide
EIVRKVPARLEPLPIVYYIGKTPAAAAAA

SEQ ID NO: 5562 - protein, 27 aa, Artificial Sequence
  Cyclic GFR-binding peptide
DENEKVPTRLEPLPIVYYVGRTPGGGG

SEQ ID NO: 5563 - protein, 29 aa, Artificial Sequence
  Cyclic GFR-binding peptide
DENKNAPVKTEPLPIVYYRIKPHGGGGGG

SEQ ID NO: 5564 - protein, 27 aa, Artificial Sequence
  Cyclic GFR-binding peptide
DEYDKVSQDLEPLPIVYYRIKPHAAAA

SEQ ID NO: 5565 - protein, 29 aa, Artificial Sequence
  Cyclic GFR-binding peptide
DDSSNVPTEEEPLPIVYYRIKPHAAAAAA

SEQ ID NO: 5566 - protein, 27 aa, Artificial Sequence
  Cyclic GFR-binding peptide
DDSSNVPTGQEPLPIVYYRIKPHGGGG

SEQ ID NO: 5567 - protein, 29 aa, Artificial Sequence
  Cyclic GFR-binding peptide
DDSSNSRVHHEPLPIVYYEYVRKGGGGGG

SEQ ID NO: 5568 - protein, 27 aa, Artificial Sequence
  Cyclic GFR-binding peptide
DSSNNTQVQLEPLPIVYYEIVRKAAAA

SEQ ID NO: 5569 - protein, 27 aa, Artificial Sequence
  Cyclic GFR-binding peptide
DDMGVVSQELEPLTILYYDENEKGGGG

SEQ ID NO: 5570 - protein, 29 aa, Artificial Sequence
  Cyclic GFR-binding peptide
DKGVVVSQKMEPLTILYYDENKNGGGGGG

SEQ ID NO: 5571 - protein, 27 aa, Artificial Sequence
  Cyclic GFR-binding peptide
NDKQQVSQKLEPLTILYYDEYDKAAAA

SEQ ID NO: 5572 - protein, 29 aa, Artificial Sequence
  Cyclic GFR-binding peptide
DAANNVSQQLEPLTILYYDDSSNAAAAAA

SEQ ID NO: 5573 - protein, 27 aa, Artificial Sequence
  Cyclic GFR-binding peptide
DSANNVSQRLEPLTILYYDDSSNGGGG

SEQ ID NO: 5574 - protein, 29 aa, Artificial Sequence
  Cyclic GFR-binding peptide
DDSSNVSQKTEPLTILYYDDSSNGGGGGG

SEQ ID NO: 5575 - protein, 27 aa, Artificial Sequence
  Cyclic GFR-binding peptide
DNGRVVSQALEPLTILYYDSSNNAAAA

SEQ ID NO: 5576 - protein, 29 aa, Artificial Sequence
  Cyclic GFR-binding peptide
VGRKPVSQDLEPLTILYYDDMGVAAAAAA

SEQ ID NO: 5577 - protein, 27 aa, Artificial Sequence
  Cyclic GFR-binding peptide
IGKTPVPTELEPLTILYYDKGVVGGGG

SEQ ID NO: 5578 - protein, 29 aa, Artificial Sequence
  Cyclic GFR-binding peptide
VGRTPVPEKMEPLTILYYNDKQQGGGGGG

SEQ ID NO: 5579 - protein, 27 aa, Artificial Sequence
  Cyclic GFR-binding peptide
RIKPHAPTKLEPLTILYYDAANNAAAA

SEQ ID NO: 5580 - protein, 29 aa, Artificial Sequence
  Cyclic GFR-binding peptide
RIKPHAPTQLEPLTILYYDSANNAAAAAA

SEQ ID NO: 5581 - protein, 27 aa, Artificial Sequence
  Cyclic GFR-binding peptide
RIKPHVPTKLEPLTILYYDDSSNGGGG

SEQ ID NO: 5582 - protein, 29 aa, Artificial Sequence
  Cyclic GFR-binding peptide
RIKPHTPTKMEPLTILYYDNGRVGGGGGG

SEQ ID NO: 5583 - protein, 27 aa, Artificial Sequence
  Cyclic GFR-binding peptide
EYVRKVPARLEPLTILYYVGRKPAAAA

SEQ ID NO: 5584 - protein, 29 aa, Artificial Sequence
  Cyclic GFR-binding peptide
EIVRKVPTRLEPLTILYYIGKTPAAAAAA

SEQ ID NO: 5585 - protein, 27 aa, Artificial Sequence
  Cyclic GFR-binding peptide
DENEKAPVKTEPLTILYYVGRTPGGGG

SEQ ID NO: 5586 - protein, 29 aa, Artificial Sequence
  Cyclic GFR-binding peptide
DENKNVPQALEPLTILYYRIKPHGGGGGG

SEQ ID NO: 5587 - protein, 27 aa, Artificial Sequence
  Cyclic GFR-binding peptide
DEYDKVPTEEEPLTILYYRIKPHAAAA

SEQ ID NO: 5588 - protein, 29 aa, Artificial Sequence
  Cyclic GFR-binding peptide
DDSSNVPTGQEPLTILYYRIKPHAAAAAA

SEQ ID NO: 5589 - protein, 27 aa, Artificial Sequence
  Cyclic GFR-binding peptide
DDSSNSRVHHEPLTILYYRIKPHGGGG

SEQ ID NO: 5590 - protein, 29 aa, Artificial Sequence
  Cyclic GFR-binding peptide
DDSSNTQVQLEPLTILYYEYVRKGGGGGG

SEQ ID NO: 5591 - protein, 27 aa, Artificial Sequence
  Cyclic GFR-binding peptide
DSSNNVPQELEPLTILYYEIVRKAAAA

SEQ ID NO: 5592 - protein, 27 aa, Artificial Sequence
  Cyclic GFR-binding peptide
DDMGVVPQKMEPLTILYYDENEKGGGG

SEQ ID NO: 5593 - protein, 29 aa, Artificial Sequence
  Cyclic GFR-binding peptide
DKGVVVPQKLEPLTILYYDENKNGGGGGG

SEQ ID NO: 5594 - protein, 27 aa, Artificial Sequence
  Cyclic GFR-binding peptide
NDKQQVPQQLEPLTILYYDEYDKAAAA

SEQ ID NO: 5595 - protein, 29 aa, Artificial Sequence
  Cyclic GFR-binding peptide
DAANNVPQRLEPLTILYYDDSSNAAAAAA

SEQ ID NO: 5596 - protein, 27 aa, Artificial Sequence
  Cyclic GFR-binding peptide
DSANNVPQKTEPLTILYYDDSSNGGGG

SEQ ID NO: 5597 - protein, 29 aa, Artificial Sequence
  Cyclic GFR-binding peptide
DDSSNVPQDLEPLTILYYDDSSNGGGGGG

SEQ ID NO: 5598 - protein, 27 aa, Artificial Sequence
  Cyclic GFR-binding peptide
DNGRVVPTGQSNITMQIMDSSNNAAAA

SEQ ID NO: 5599 - protein, 29 aa, Artificial Sequence
  Cyclic GFR-binding peptide
VGRKPVPEKMSNITMQIMDDMGVAAAAAA

SEQ ID NO: 5600 - protein, 27 aa, Artificial Sequence
  Cyclic GFR-binding peptide
IGKTPAPTKLSNITMQIMDKGVVGGGG

SEQ ID NO: 5601 - protein, 29 aa, Artificial Sequence
  Cyclic GFR-binding peptide
VGRTPAPTQLSNITMQIMNDKQQGGGGGG

SEQ ID NO: 5602 - protein, 27 aa, Artificial Sequence
  Cyclic GFR-binding peptide
RIKPHTPTKMSNITMQIMDAANNAAAA

SEQ ID NO: 5603 - protein, 29 aa, Artificial Sequence
  Cyclic GFR-binding peptide
RIKPHVPARLSNITMQIMDSANNAAAAAA

SEQ ID NO: 5604 - protein, 27 aa, Artificial Sequence
  Cyclic GFR-binding peptide
RIKPHAPVKTSNITMQIMDDSSNGGGG

SEQ ID NO: 5605 - protein, 29 aa, Artificial Sequence
  Cyclic GFR-binding peptide
RIKPHVPQALSNITMQIMDNGRVGGGGGG

SEQ ID NO: 5606 - protein, 27 aa, Artificial Sequence
  Cyclic GFR-binding peptide
EYVRKVSQDLSNITMQIMVGRKPAAAA

SEQ ID NO: 5607 - protein, 29 aa, Artificial Sequence
  Cyclic GFR-binding peptide
EIVRKVPQDLSNITMQIMIGKTPAAAAAA

SEQ ID NO: 5608 - protein, 27 aa, Artificial Sequence
  Cyclic GFR-binding peptide
DENEKSRVHHSNITMQIMVGRTPGGGG

SEQ ID NO: 5609 - protein, 29 aa, Artificial Sequence
  Cyclic GFR-binding peptide
DENKNTQVQLSNITMQIMRIKPHGGGGGG

SEQ ID NO: 5610 - protein, 27 aa, Artificial Sequence
  Cyclic GFR-binding peptide
DEYDKSRVQLRSVKVAKVRIKPHAAAA

SEQ ID NO: 5611 - protein, 29 aa, Artificial Sequence
  Cyclic GFR-binding peptide
DDSSNVPTELRSVKVAKVRIKPHAAAAAA

SEQ ID NO: 5612 - protein, 27 aa, Artificial Sequence
  Cyclic GFR-binding peptide
DDSSNVPEKMRSVKVAKVRIKPHGGGG

SEQ ID NO: 5613 - protein, 29 aa, Artificial Sequence
  Cyclic GFR-binding peptide
DDSSNAPTKLRSVKVAKVEYVRKGGGGGG

SEQ ID NO: 5614 - protein, 27 aa, Artificial Sequence
  Cyclic GFR-binding peptide
DSSNNAPTQLRSVKVAKVEIVRKAAAA

SEQ ID NO: 5615 - protein, 27 aa, Artificial Sequence
  Cyclic GFR-binding peptide
DDMGVVPTKLRSVKVAKVDENEKGGGG

SEQ ID NO: 5616 - protein, 29 aa, Artificial Sequence
  Cyclic GFR-binding peptide
DKGVVTPTKMRSVKVAKVDENKNGGGGGG

SEQ ID NO: 5617 - protein, 27 aa, Artificial Sequence
  Cyclic GFR-binding peptide
NDKQQVPARLRSVKVAKVDEYDKAAAA

SEQ ID NO: 5618 - protein, 29 aa, Artificial Sequence
  Cyclic GFR-binding peptide
DAANNVPTRLRSVKVAKVDDSSNAAAAAA

SEQ ID NO: 5619 - protein, 27 aa, Artificial Sequence
  Cyclic GFR-binding peptide
DSANNAPVKTRSVKVAKVDDSSNGGGG

SEQ ID NO: 5620 - protein, 29 aa, Artificial Sequence
  Cyclic GFR-binding peptide
DDSSNVPQALRSVKVAKVDDSSNGGGGGG

SEQ ID NO: 5621 - protein, 27 aa, Artificial Sequence
  Cyclic GFR-binding peptide
DNGRVVSQDLRSVKVAKVDSSNNAAAA

SEQ ID NO: 5622 - protein, 29 aa, Artificial Sequence
  Cyclic GFR-binding peptide
VGRKPVPQDLRSVKVAKVDDMGVAAAAAA

SEQ ID NO: 5623 - protein, 27 aa, Artificial Sequence
  Cyclic GFR-binding peptide
IGKTPVPTEERSVKVAKVDKGVVGGGG

SEQ ID NO: 5624 - protein, 29 aa, Artificial Sequence
  Cyclic GFR-binding peptide
VGRTPVPTGQRSVKVAKVNDKQQGGGGGG

SEQ ID NO: 5625 - protein, 27 aa, Artificial Sequence
  Cyclic GFR-binding peptide
RIKPHTQVQLRSVKVAKVDAANNAAAA

SEQ ID NO: 5626 - protein, 29 aa, Artificial Sequence
  Cyclic GFR-binding peptide
RIKPHTQVHHRPVQVRKIDSANNAAAAAA

SEQ ID NO: 5627 - protein, 27 aa, Artificial Sequence
  Cyclic GFR-binding peptide
RIKPHVPTELRPVQVRKIDDSSNGGGG

SEQ ID NO: 5628 - protein, 29 aa, Artificial Sequence
  Cyclic GFR-binding peptide
RIKPHVPEKMRPVQVRKIDNGRVGGGGGG

SEQ ID NO: 5629 - protein, 27 aa, Artificial Sequence
  Cyclic GFR-binding peptide
EYVRKAPTKLRPVQVRKIVGRKPAAAA

SEQ ID NO: 5630 - protein, 29 aa, Artificial Sequence
  Cyclic GFR-binding peptide
EIVRKAPTQLRPVQVRKIIGKTPAAAAAA

SEQ ID NO: 5631 - protein, 27 aa, Artificial Sequence
  Cyclic GFR-binding peptide
DENEKVPTKLRPVQVRKIVGRTPGGGG

SEQ ID NO: 5632 - protein, 29 aa, Artificial Sequence
  Cyclic GFR-binding peptide
DENKNTPTKMRPVQVRKIRIKPHGGGGGG

SEQ ID NO: 5633 - protein, 27 aa, Artificial Sequence
  Cyclic GFR-binding peptide
DEYDKVPARLRPVQVRKIRIKPHAAAA

SEQ ID NO: 5634 - protein, 29 aa, Artificial Sequence
  Cyclic GFR-binding peptide
DDSSNVPTRLRPVQVRKIRIKPHAAAAAA

SEQ ID NO: 5635 - protein, 27 aa, Artificial Sequence
  Cyclic GFR-binding peptide
DDSSNAPVKTRPVQVRKIRIKPHGGGG

SEQ ID NO: 5636 - protein, 29 aa, Artificial Sequence
  Cyclic GFR-binding peptide
DDSSNVPQALRPVQVRKIEYVRKGGGGGG

SEQ ID NO: 5637 - protein, 27 aa, Artificial Sequence
  Cyclic GFR-binding peptide
DSSNNVSQDLRPVQVRKIEIVRKAAAA

SEQ ID NO: 5638 - protein, 27 aa, Artificial Sequence
  Cyclic GFR-binding peptide
DDMGVVPQDLRPVQVRKIDENEKGGGG

SEQ ID NO: 5639 - protein, 29 aa, Artificial Sequence
  Cyclic GFR-binding peptide
DKGVVVPTEERPVQVRKIDENKNGGGGGG

SEQ ID NO: 5640 - protein, 27 aa, Artificial Sequence
  Cyclic GFR-binding peptide
NDKQQVPTGQRPVQVRKIDEYDKAAAA

SEQ ID NO: 5641 - protein, 29 aa, Artificial Sequence
  Cyclic GFR-binding peptide
DAANNSRVHHRPVQVRKIDDSSNAAAAAA

SEQ ID NO: 5642 - protein, 27 aa, Artificial Sequence
  Cyclic GFR-binding peptide
GGGGKENEDLYLMSIASMKTPVGWFWW

SEQ ID NO: 5643 - protein, 29 aa, Artificial Sequence
  Cyclic GFR-binding peptide
GGGGGGNKNEDLYLMSIASLKTPVPGPTG

SEQ ID NO: 5644 - protein, 28 aa, Artificial Sequence
  Cyclic GFR-binding peptide
AAAAKDYEDLYLMSIASLQTPVGGWFWW

SEQ ID NO: 5645 - protein, 30 aa, Artificial Sequence
  Cyclic GFR-binding peptide
AAAAAANSSDDLYLMSIASLRTPVGPGPTG

SEQ ID NO: 5646 - protein, 29 aa, Artificial Sequence
  Cyclic GFR-binding peptide
GGGGNSSDDLYLMSIASTKTPVGGGWFWW

SEQ ID NO: 5647 - protein, 31 aa, Artificial Sequence
  Cyclic GFR-binding peptide
GGGGGGNSSDDLYLMSIASLATPVGGPGPTG

SEQ ID NO: 5648 - protein, 30 aa, Artificial Sequence
  Cyclic GFR-binding peptide
AAAANNSSDLYLMSIASLDTPVGGGGWFWW

SEQ ID NO: 5649 - protein, 32 aa, Artificial Sequence
  Cyclic GFR-binding peptide
AAAAAAVGMDDLYLMSIASMKEPVGGGPGPTG

SEQ ID NO: 5650 - protein, 27 aa, Artificial Sequence
  Cyclic GFR-binding peptide
GGGGVVGKDLYLMSIASLKTPAGWFWW

SEQ ID NO: 5651 - protein, 29 aa, Artificial Sequence
  Cyclic GFR-binding peptide
GGGGGGQQKDNLYLMSIASLQTPAPGPTG

SEQ ID NO: 5652 - protein, 28 aa, Artificial Sequence
  Cyclic GFR-binding peptide
AAAANNAADLYLMSIASMKTPTGGWFWW

SEQ ID NO: 5653 - protein, 30 aa, Artificial Sequence
  Cyclic GFR-binding peptide
AAAAAANNASDLYLMSIASLRAPVGPGPTG

SEQ ID NO: 5654 - protein, 29 aa, Artificial Sequence
  Cyclic GFR-binding peptide
GGGGNSSDDLYLMSIASTKVPAGGGWFWW

SEQ ID NO: 5655 - protein, 31 aa, Artificial Sequence
  Cyclic GFR-binding peptide
GGGGGGVRGNDLYLMSIASLAQPVGGPGPTG

SEQ ID NO: 5656 - protein, 30 aa, Artificial Sequence
  Cyclic GFR-binding peptide
AAAAPKRGVLYLMSIASLDQSVGGGGWFWW

SEQ ID NO: 5657 - protein, 32 aa, Artificial Sequence
  Cyclic GFR-binding peptide
AAAAAAPTKGILYLMSIASLDQPVGGGPGPTG

SEQ ID NO: 5658 - protein, 27 aa, Artificial Sequence
  Cyclic GFR-binding peptide
GGGGPTRGVLYLMSIASHHVRSGWFWW

SEQ ID NO: 5659 - protein, 29 aa, Artificial Sequence
  Cyclic GFR-binding peptide
GGGGGGHPKIRLYLMSIASLQVQTPGPTG

SEQ ID NO: 5660 - protein, 28 aa, Artificial Sequence
  Cyclic GFR-binding peptide
AAAAHPKIRFFLISLSSLEEPVGGWFWW

SEQ ID NO: 5661 - protein, 30 aa, Artificial Sequence
  Cyclic GFR-binding peptide
AAAAAAHPKIRFFLISLSSLKEPVGPGPTG

SEQ ID NO: 5662 - protein, 29 aa, Artificial Sequence
  Cyclic GFR-binding peptide
GGGGHPKIRFFLISLSSLQEPVGGGWFWW

SEQ ID NO: 5663 - protein, 31 aa, Artificial Sequence
  Cyclic GFR-binding peptide
GGGGGGKRVYEFFLISLSSMKEPVGGPGPTG

SEQ ID NO: 5664 - protein, 30 aa, Artificial Sequence
  Cyclic GFR-binding peptide
AAAAKRVIEFFLISLSSLREPVGGGGWFWW

SEQ ID NO: 5665 - protein, 30 aa, Artificial Sequence
  Cyclic GFR-binding peptide
GGGGKENEDFFLISLSSTKEPVGGGPGPTG

SEQ ID NO: 5666 - protein, 29 aa, Artificial Sequence
  Cyclic GFR-binding peptide
GGGGGGNKNEDFFLISLSSLAEPVGWFWW

SEQ ID NO: 5667 - protein, 27 aa, Artificial Sequence
  Cyclic GFR-binding peptide
AAAAKDYEDFFLISLSSLDEPVPGPTG

SEQ ID NO: 5668 - protein, 30 aa, Artificial Sequence
  Cyclic GFR-binding peptide
AAAAAANSSDDFFLISLSSLETPVGGWFWW

SEQ ID NO: 5669 - protein, 28 aa, Artificial Sequence
  Cyclic GFR-binding peptide
GGGGNSSDDFFLISLSSLKTPAGPGPTG

SEQ ID NO: 5670 - protein, 31 aa, Artificial Sequence
  Cyclic GFR-binding peptide
GGGGGGNSSDDFFLISLSSLQTPAGGGWFWW

SEQ ID NO: 5671 - protein, 29 aa, Artificial Sequence
  Cyclic GFR-binding peptide
AAAANNSSDFFLISLSSLKTPVGGPGPTG

SEQ ID NO: 5672 - protein, 32 aa, Artificial Sequence
  Cyclic GFR-binding peptide
AAAAAAVGMDDFFLISLSSMKTPTGGGGWFWW

SEQ ID NO: 5673 - protein, 30 aa, Artificial Sequence
  Cyclic GFR-binding peptide
GGGGVVGKDFFLISLSSLRAPVGGGPGPTG

SEQ ID NO: 5674 - protein, 29 aa, Artificial Sequence
  Cyclic GFR-binding peptide
GGGGGGQQKDNFFLISLSSLRTPVGWFWW

SEQ ID NO: 5675 - protein, 27 aa, Artificial Sequence
  Cyclic GFR-binding peptide
AAAANNAADFFLISLSSTKVPAPGPTG

SEQ ID NO: 5676 - protein, 30 aa, Artificial Sequence
  Cyclic GFR-binding peptide
AAAAAANNASDFFLISLSSLAQPVGGWFWW

SEQ ID NO: 5677 - protein, 28 aa, Artificial Sequence
  Cyclic GFR-binding peptide
GGGGNSSDDFFLISLSSLDQSVGPGPTG

SEQ ID NO: 5678 - protein, 31 aa, Artificial Sequence
  Cyclic GFR-binding peptide
GGGGGGVRGNDFFLISLSSLDQPVGGGWFWW

SEQ ID NO: 5679 - protein, 29 aa, Artificial Sequence
  Cyclic GFR-binding peptide
AAAAPKRGVFFLISLSSEETPVGGPGPTG

SEQ ID NO: 5680 - protein, 32 aa, Artificial Sequence
  Cyclic GFR-binding peptide
AAAAAAPTKGIFFLISLSSQGTPVGGGGWFWW

SEQ ID NO: 5681 - protein, 30 aa, Artificial Sequence
  Cyclic GFR-binding peptide
GGGGPTRGVFFLISLSSHHVRSGGGPGPTG

SEQ ID NO: 5682 - protein, 29 aa, Artificial Sequence
  Cyclic GFR-binding peptide
GGGGGGHPKIRFFLISLSSLQVQTGWFWW

SEQ ID NO: 5683 - protein, 27 aa, Artificial Sequence
  Cyclic GFR-binding peptide
AAAAHPKIRFYLVSIANLETPAPGPTG

SEQ ID NO: 5684 - protein, 30 aa, Artificial Sequence
  Cyclic GFR-binding peptide
AAAAAAHPKIRFYLVSIANMKTPAGGWFWW

SEQ ID NO: 5685 - protein, 28 aa, Artificial Sequence
  Cyclic GFR-binding peptide
GGGGHPKIRFYLVSIANLKTPAGPGPTG

SEQ ID NO: 5686 - protein, 31 aa, Artificial Sequence
  Cyclic GFR-binding peptide
GGGGGGKRVYEFYLVSIANLRTPAGGGWFWW

SEQ ID NO: 5687 - protein, 29 aa, Artificial Sequence
  Cyclic GFR-binding peptide
AAAAKRVIEFYLVSIANTKTPAGGPGPTG

SEQ ID NO: 5688 - protein, 30 aa, Artificial Sequence
  Cyclic GFR-binding peptide
GGGGKENEDFYLVSIANLATPAGGGGWFWW

SEQ ID NO: 5689 - protein, 32 aa, Artificial Sequence
  Cyclic GFR-binding peptide
GGGGGGNKNEDFYLVSIANLDTPAGGGPGPTG

SEQ ID NO: 5690 - protein, 27 aa, Artificial Sequence
  Cyclic GFR-binding peptide
AAAAKDYEDFYLVSIANLETPVGWFWW

SEQ ID NO: 5691 - protein, 29 aa, Artificial Sequence
  Cyclic GFR-binding peptide
AAAAAANSSDDFYLVSIANMKEPVPGPTG

SEQ ID NO: 5692 - protein, 28 aa, Artificial Sequence
  Cyclic GFR-binding peptide
GGGGNSSDDFYLVSIANLKTPVGGWFWW

SEQ ID NO: 5693 - protein, 30 aa, Artificial Sequence
  Cyclic GFR-binding peptide
GGGGGGNSSDDFYLVSIANMKTPTGPGPTG

SEQ ID NO: 5694 - protein, 29 aa, Artificial Sequence
  Cyclic GFR-binding peptide
AAAANNSSDFYLVSIANLRAPVGGGWFWW

SEQ ID NO: 5695 - protein, 31 aa, Artificial Sequence
  Cyclic GFR-binding peptide
AAAAAAVGMDDFYLVSIANLRTPVGGPGPTG

SEQ ID NO: 5696 - protein, 30 aa, Artificial Sequence
  Cyclic GFR-binding peptide
GGGGVVGKDFYLVSIANTKVPAGGGGWFWW

SEQ ID NO: 5697 - protein, 32 aa, Artificial Sequence
  Cyclic GFR-binding peptide
GGGGGGQQKDNFYLVSIANLAQPVGGGPGPTG

SEQ ID NO: 5698 - protein, 27 aa, Artificial Sequence
  Cyclic GFR-binding peptide
AAAANNAADFYLVSIANLDQSVGWFWW

SEQ ID NO: 5699 - protein, 29 aa, Artificial Sequence
  Cyclic GFR-binding peptide
AAAAAANNASDFYLVSIANLDQPVPGPTG

SEQ ID NO: 5700 - protein, 28 aa, Artificial Sequence
  Cyclic GFR-binding peptide
GGGGNSSDDFYLVSIANEETPVGGWFWW

SEQ ID NO: 5701 - protein, 30 aa, Artificial Sequence
  Cyclic GFR-binding peptide
GGGGGGVRGNDFYLVSIANQGTPVGPGPTG

SEQ ID NO: 5702 - protein, 29 aa, Artificial Sequence
  Cyclic GFR-binding peptide
AAAAPKRGVFYLVSIANHHVRSGGGWFWW

SEQ ID NO: 5703 - protein, 31 aa, Artificial Sequence
  Cyclic GFR-binding peptide
AAAAAAPTKGIFYLVSIANLQVQTGGPGPTG

SEQ ID NO: 5704 - protein, 30 aa, Artificial Sequence
  Cyclic GFR-binding peptide
GGGGPTRGVYYLVSTASLETPAGGGGWFWW

SEQ ID NO: 5705 - protein, 32 aa, Artificial Sequence
  Cyclic GFR-binding peptide
GGGGGGHPKIRYYLVSTASMKTPAGGGPGPTG

SEQ ID NO: 5706 - protein, 27 aa, Artificial Sequence
  Cyclic GFR-binding peptide
AAAAHPKIRYYLVSTASLKTPAGWFWW

SEQ ID NO: 5707 - protein, 29 aa, Artificial Sequence
  Cyclic GFR-binding peptide
AAAAAAHPKIRYYLVSTASLQTPAPGPTG

SEQ ID NO: 5708 - protein, 28 aa, Artificial Sequence
  Cyclic GFR-binding peptide
GGGGHPKIRYYLVSTASLRTPAGGWFWW

SEQ ID NO: 5709 - protein, 30 aa, Artificial Sequence
  Cyclic GFR-binding peptide
GGGGGGKRVYEYYLVSTASTKTPAGPGPTG

SEQ ID NO: 5710 - protein, 29 aa, Artificial Sequence
  Cyclic GFR-binding peptide
AAAAKRVIEYYLVSTASLATPAGGGWFWW

SEQ ID NO: 5711 - protein, 29 aa, Artificial Sequence
  Cyclic GFR-binding peptide
GGGGKENEDYYLVSTASLDTPAGGPGPTG

SEQ ID NO: 5712 - protein, 32 aa, Artificial Sequence
  Cyclic GFR-binding peptide
GGGGGGNKNEDYYLVSTASLETPVGGGGWFWW

SEQ ID NO: 5713 - protein, 30 aa, Artificial Sequence
  Cyclic GFR-binding peptide
AAAAKDYEDYYLVSTASMKEPVGGGPGPTG

SEQ ID NO: 5714 - protein, 29 aa, Artificial Sequence
  Cyclic GFR-binding peptide
AAAAAANSSDDYYLVSTASLKTPVGWFWW

SEQ ID NO: 5715 - protein, 27 aa, Artificial Sequence
  Cyclic GFR-binding peptide
GGGGNSSDDYYLVSTASMKTPTPGPTG

SEQ ID NO: 5716 - protein, 30 aa, Artificial Sequence
  Cyclic GFR-binding peptide
GGGGGGNSSDDYYLVSTASLRAPVGGWFWW

SEQ ID NO: 5717 - protein, 28 aa, Artificial Sequence
  Cyclic GFR-binding peptide
AAAANNSSDYYLVSTASLRTPVGPGPTG

SEQ ID NO: 5718 - protein, 31 aa, Artificial Sequence
  Cyclic GFR-binding peptide
AAAAAAVGMDDYYLVSTASTKVPAGGGWFWW

SEQ ID NO: 5719 - protein, 29 aa, Artificial Sequence
  Cyclic GFR-binding peptide
GGGGVVGKDYYLVSTASLAQPVGGPGPTG

SEQ ID NO: 5720 - protein, 32 aa, Artificial Sequence
  Cyclic GFR-binding peptide
GGGGGGQQKDNYYLVSTASLDQSVGGGGWFWW

SEQ ID NO: 5721 - protein, 30 aa, Artificial Sequence
  Cyclic GFR-binding peptide
AAAANNAADYYLVSTASLDQPVGGGPGPTG

SEQ ID NO: 5722 - protein, 29 aa, Artificial Sequence
  Cyclic GFR-binding peptide
AAAAAANNASDYYLVSTASEETPVGWFWW

SEQ ID NO: 5723 - protein, 27 aa, Artificial Sequence
  Cyclic GFR-binding peptide
GGGGNSSDDYYLVSTASQGTPVPGPTG

SEQ ID NO: 5724 - protein, 30 aa, Artificial Sequence
  Cyclic GFR-binding peptide
GGGGGGVRGNDYYLVSTASHHVRSGGWFWW

SEQ ID NO: 5725 - protein, 28 aa, Artificial Sequence
  Cyclic GFR-binding peptide
AAAAPKRGVYYLVSTASLQVQTGPGPTG

SEQ ID NO: 5726 - protein, 31 aa, Artificial Sequence
  Cyclic GFR-binding peptide
AAAAAAPTKGIKYLVSIPSLETPVGGGWFWW

SEQ ID NO: 5727 - protein, 29 aa, Artificial Sequence
  Cyclic GFR-binding peptide
GGGGPTRGVKYLVSIPSMKTPVGGPGPTG

SEQ ID NO: 5728 - protein, 32 aa, Artificial Sequence
  Cyclic GFR-binding peptide
GGGGGGHPKIRKYLVSIPSLKTPVGGGGWFWW

SEQ ID NO: 5729 - protein, 30 aa, Artificial Sequence
  Cyclic GFR-binding peptide
AAAAHPKIRKYLVSIPSLQTPVGGGPGPTG

SEQ ID NO: 5730 - protein, 29 aa, Artificial Sequence
  Cyclic GFR-binding peptide
AAAAAAHPKIRKYLVSIPSLRTPVGWFWW

SEQ ID NO: 5731 - protein, 27 aa, Artificial Sequence
  Cyclic GFR-binding peptide
GGGGHPKIRKYLVSIPSTKTPVPGPTG

SEQ ID NO: 5732 - protein, 30 aa, Artificial Sequence
  Cyclic GFR-binding peptide
GGGGGGKRVYEKYLVSIPSLATPVGGWFWW

SEQ ID NO: 5733 - protein, 28 aa, Artificial Sequence
  Cyclic GFR-binding peptide
AAAAKRVIEKYLVSIPSLDTPVGPGPTG

SEQ ID NO: 5734 - protein, 29 aa, Artificial Sequence
  Cyclic GFR-binding peptide
GGGGKENEDKYLVSIPSMKEPVGGGWFWW

SEQ ID NO: 5735 - protein, 31 aa, Artificial Sequence
  Cyclic GFR-binding peptide
GGGGGGNKNEDKYLVSIPSLKTPAGGPGPTG

SEQ ID NO: 5736 - protein, 30 aa, Artificial Sequence
  Cyclic GFR-binding peptide
AAAAKDYEDKYLVSIPSLQTPAGGGGWFWW

SEQ ID NO: 5737 - protein, 32 aa, Artificial Sequence
  Cyclic GFR-binding peptide
AAAAAANSSDDKYLVSIPSMKTPTGGGPGPTG

SEQ ID NO: 5738 - protein, 27 aa, Artificial Sequence
  Cyclic GFR-binding peptide
GGGGNSSDDKYLVSIPSLRAPVGWFWW

SEQ ID NO: 5739 - protein, 29 aa, Artificial Sequence
  Cyclic GFR-binding peptide
GGGGGGNSSDDKYLVSIPSTKVPAPGPTG

SEQ ID NO: 5740 - protein, 28 aa, Artificial Sequence
  Cyclic GFR-binding peptide
AAAANNSSDKYLVSIPSLAQPVGGWFWW

SEQ ID NO: 5741 - protein, 30 aa, Artificial Sequence
  Cyclic GFR-binding peptide
AAAAAAVGMDDKYLVSIPSLDQSVGPGPTG

SEQ ID NO: 5742 - protein, 29 aa, Artificial Sequence
  Cyclic GFR-binding peptide
GGGGVVGKDKYLVSIPSLDQPVGGGWFWW

SEQ ID NO: 5743 - protein, 31 aa, Artificial Sequence
  Cyclic GFR-binding peptide
GGGGGGQQKDNKYLVSIPSHHVRSGGPGPTG

SEQ ID NO: 5744 - protein, 30 aa, Artificial Sequence
  Cyclic GFR-binding peptide
AAAANNAADKYLVSIPSLQVQTGGGGWFWW

SEQ ID NO: 5745 - protein, 32 aa, Artificial Sequence
  Cyclic GFR-binding peptide
AAAAAANNASDLYLISIPELETPVGGGPGPTG

SEQ ID NO: 5746 - protein, 27 aa, Artificial Sequence
  Cyclic GFR-binding peptide
GGGGNSSDDLYLISIPEMKTPVGWFWW

SEQ ID NO: 5747 - protein, 29 aa, Artificial Sequence
  Cyclic GFR-binding peptide
GGGGGGVRGNDLYLISIPELKTPVPGPTG

SEQ ID NO: 5748 - protein, 28 aa, Artificial Sequence
  Cyclic GFR-binding peptide
AAAAPKRGVLYLISIPELQTPVGGWFWW

SEQ ID NO: 5749 - protein, 30 aa, Artificial Sequence
  Cyclic GFR-binding peptide
AAAAAAPTKGILYLISIPELRTPVGPGPTG

SEQ ID NO: 5750 - protein, 29 aa, Artificial Sequence
  Cyclic GFR-binding peptide
GGGGPTRGVLYLISIPETKTPVGGGWFWW

SEQ ID NO: 5751 - protein, 31 aa, Artificial Sequence
  Cyclic GFR-binding peptide
GGGGGGHPKIRLYLISIPELATPVGGPGPTG

SEQ ID NO: 5752 - protein, 30 aa, Artificial Sequence
  Cyclic GFR-binding peptide
AAAAHPKIRLYLISIPELDTPVGGGGWFWW

SEQ ID NO: 5753 - protein, 32 aa, Artificial Sequence
  Cyclic GFR-binding peptide
AAAAAAHPKIRLYLISIPEMKEPVGGGPGPTG

SEQ ID NO: 5754 - protein, 27 aa, Artificial Sequence
  Cyclic GFR-binding peptide
GGGGHPKIRLYLISIPELKTPAGWFWW

SEQ ID NO: 5755 - protein, 29 aa, Artificial Sequence
  Cyclic GFR-binding peptide
GGGGGGKRVYELYLISIPELQTPAPGPTG

SEQ ID NO: 5756 - protein, 28 aa, Artificial Sequence
  Cyclic GFR-binding peptide
AAAAKRVIELYLISIPEMKTPTGGWFWW

SEQ ID NO: 5757 - protein, 28 aa, Artificial Sequence
  Cyclic GFR-binding peptide
GGGGKENEDLYLISIPELRAPVGPGPTG

SEQ ID NO: 5758 - protein, 31 aa, Artificial Sequence
  Cyclic GFR-binding peptide
GGGGGGNKNEDLYLISIPETKVPAGGGWFWW

SEQ ID NO: 5759 - protein, 29 aa, Artificial Sequence
  Cyclic GFR-binding peptide
AAAAKDYEDLYLISIPELAQPVGGPGPTG

SEQ ID NO: 5760 - protein, 32 aa, Artificial Sequence
  Cyclic GFR-binding peptide
AAAAAANSSDDLYLISIPELDQSVGGGGWFWW

SEQ ID NO: 5761 - protein, 30 aa, Artificial Sequence
  Cyclic GFR-binding peptide
GGGGNSSDDLYLISIPELDQPVGGGPGPTG

SEQ ID NO: 5762 - protein, 29 aa, Artificial Sequence
  Cyclic GFR-binding peptide
GGGGGGNSSDDLYLISIPEHHVRSGWFWW

SEQ ID NO: 5763 - protein, 27 aa, Artificial Sequence
  Cyclic GFR-binding peptide
AAAANNSSDLYLISIPELQVQTPGPTG

SEQ ID NO: 5764 - protein, 30 aa, Artificial Sequence
  Cyclic GFR-binding peptide
AAAAAAVGMDDFYLMNIPSLETPTGGWFWW

SEQ ID NO: 5765 - protein, 28 aa, Artificial Sequence
  Cyclic GFR-binding peptide
GGGGVVGKDFYLMNIPSMKTPTGPGPTG

SEQ ID NO: 5766 - protein, 31 aa, Artificial Sequence
  Cyclic GFR-binding peptide
GGGGGGQQKDNFYLMNIPSLKTPTGGGWFWW

SEQ ID NO: 5767 - protein, 29 aa, Artificial Sequence
  Cyclic GFR-binding peptide
AAAANNAADFYLMNIPSLQTPTGGPGPTG

SEQ ID NO: 5768 - protein, 32 aa, Artificial Sequence
  Cyclic GFR-binding peptide
AAAAAANNASDFYLMNIPSLRTPTGGGGWFWW

SEQ ID NO: 5769 - protein, 30 aa, Artificial Sequence
  Cyclic GFR-binding peptide
GGGGNSSDDFYLMNIPSTKTPTGGGPGPTG

SEQ ID NO: 5770 - protein, 29 aa, Artificial Sequence
  Cyclic GFR-binding peptide
GGGGGGVRGNDFYLMNIPSLATPTGWFWW

SEQ ID NO: 5771 - protein, 27 aa, Artificial Sequence
  Cyclic GFR-binding peptide
AAAAPKRGVFYLMNIPSLDTPTPGPTG

SEQ ID NO: 5772 - protein, 30 aa, Artificial Sequence
  Cyclic GFR-binding peptide
AAAAAAPTKGIFYLMNIPSLETPVGGWFWW

SEQ ID NO: 5773 - protein, 28 aa, Artificial Sequence
  Cyclic GFR-binding peptide
GGGGPTRGVFYLMNIPSMKEPVGPGPTG

SEQ ID NO: 5774 - protein, 31 aa, Artificial Sequence
  Cyclic GFR-binding peptide
GGGGGGHPKIRFYLMNIPSLKTPAGGGWFWW

SEQ ID NO: 5775 - protein, 29 aa, Artificial Sequence
  Cyclic GFR-binding peptide
AAAAHPKIRFYLMNIPSLQTPAGGPGPTG

SEQ ID NO: 5776 - protein, 32 aa, Artificial Sequence
  Cyclic GFR-binding peptide
AAAAAAHPKIRFYLMNIPSLKTPVGGGGWFWW

SEQ ID NO: 5777 - protein, 30 aa, Artificial Sequence
  Cyclic GFR-binding peptide
GGGGHPKIRFYLMNIPSLRAPVGGGPGPTG

SEQ ID NO: 5778 - protein, 29 aa, Artificial Sequence
  Cyclic GFR-binding peptide
GGGGGGKRVYEFYLMNIPSLRTPVGWFWW

SEQ ID NO: 5779 - protein, 27 aa, Artificial Sequence
  Cyclic GFR-binding peptide
AAAAKRVIEFYLMNIPSTKVPAPGPTG

SEQ ID NO: 5780 - protein, 28 aa, Artificial Sequence
  Cyclic GFR-binding peptide
GGGGKENEDFYLMNIPSLAQPVGGWFWW

SEQ ID NO: 5781 - protein, 30 aa, Artificial Sequence
  Cyclic GFR-binding peptide
GGGGGGNKNEDFYLMNIPSLDQSVGPGPTG

SEQ ID NO: 5782 - protein, 29 aa, Artificial Sequence
  Cyclic GFR-binding peptide
AAAAKDYEDFYLMNIPSLDQPVGGGWFWW

SEQ ID NO: 5783 - protein, 31 aa, Artificial Sequence
  Cyclic GFR-binding peptide
AAAAAANSSDDFYLMNIPSEETPVGGPGPTG

SEQ ID NO: 5784 - protein, 30 aa, Artificial Sequence
  Cyclic GFR-binding peptide
GGGGNSSDDFYLMNIPSQGTPVGGGGWFWW

SEQ ID NO: 5785 - protein, 32 aa, Artificial Sequence
  Cyclic GFR-binding peptide
GGGGGGNSSDDFYLMNIPSHHVRSGGGPGPTG

SEQ ID NO: 5786 - protein, 27 aa, Artificial Sequence
  Cyclic GFR-binding peptide
AAAANNSSDFYLMNIPSLQVQTGWFWW

SEQ ID NO: 5787 - protein, 29 aa, Artificial Sequence
  Cyclic GFR-binding peptide
AAAAAAVGMDDIYLISIPSLEAPVPGPTG

SEQ ID NO: 5788 - protein, 28 aa, Artificial Sequence
  Cyclic GFR-binding peptide
GGGGVVGKDIYLISIPSMKAPVGGWFWW

SEQ ID NO: 5789 - protein, 30 aa, Artificial Sequence
  Cyclic GFR-binding peptide
GGGGGGQQKDNIYLISIPSLKAPVGPGPTG

SEQ ID NO: 5790 - protein, 29 aa, Artificial Sequence
  Cyclic GFR-binding peptide
AAAANNAADIYLISIPSLQAPVGGGWFWW

SEQ ID NO: 5791 - protein, 31 aa, Artificial Sequence
  Cyclic GFR-binding peptide
AAAAAANNASDIYLISIPSLRAPVGGPGPTG

SEQ ID NO: 5792 - protein, 30 aa, Artificial Sequence
  Cyclic GFR-binding peptide
GGGGNSSDDIYLISIPSTKAPVGGGGWFWW

SEQ ID NO: 5793 - protein, 32 aa, Artificial Sequence
  Cyclic GFR-binding peptide
GGGGGGVRGNDIYLISIPSLAAPVGGGPGPTG

SEQ ID NO: 5794 - protein, 27 aa, Artificial Sequence
  Cyclic GFR-binding peptide
AAAAPKRGVIYLISIPSLDAPVGWFWW

SEQ ID NO: 5795 - protein, 29 aa, Artificial Sequence
  Cyclic GFR-binding peptide
AAAAAAPTKGIIYLISIPSLETPVPGPTG

SEQ ID NO: 5796 - protein, 28 aa, Artificial Sequence
  Cyclic GFR-binding peptide
GGGGPTRGVIYLISIPSMKEPVGGWFWW

SEQ ID NO: 5797 - protein, 30 aa, Artificial Sequence
  Cyclic GFR-binding peptide
GGGGGGHPKIRIYLISIPSLKTPAGPGPTG

SEQ ID NO: 5798 - protein, 29 aa, Artificial Sequence
  Cyclic GFR-binding peptide
AAAAHPKIRIYLISIPSLQTPAGGGWFWW

SEQ ID NO: 5799 - protein, 31 aa, Artificial Sequence
  Cyclic GFR-binding peptide
AAAAAAHPKIRIYLISIPSLKTPVGGPGPTG

SEQ ID NO: 5800 - protein, 30 aa, Artificial Sequence
  Cyclic GFR-binding peptide
GGGGHPKIRIYLISIPSMKTPTGGGGWFWW

SEQ ID NO: 5801 - protein, 32 aa, Artificial Sequence
  Cyclic GFR-binding peptide
GGGGGGKRVYEIYLISIPSLRTPVGGGPGPTG

SEQ ID NO: 5802 - protein, 27 aa, Artificial Sequence
  Cyclic GFR-binding peptide
AAAAKRVIEIYLISIPSTKVPAGWFWW

SEQ ID NO: 5803 - protein, 27 aa, Artificial Sequence
  Cyclic GFR-binding peptide
GGGGKENEDIYLISIPSLAQPVPGPTG

SEQ ID NO: 5804 - protein, 30 aa, Artificial Sequence
  Cyclic GFR-binding peptide
GGGGGGNKNEDIYLISIPSLDQSVGGWFWW

SEQ ID NO: 5805 - protein, 28 aa, Artificial Sequence
  Cyclic GFR-binding peptide
AAAAKDYEDIYLISIPSLDQPVGPGPTG

SEQ ID NO: 5806 - protein, 31 aa, Artificial Sequence
  Cyclic GFR-binding peptide
AAAAAANSSDDIYLISIPSEETPVGGGWFWW

SEQ ID NO: 5807 - protein, 29 aa, Artificial Sequence
  Cyclic GFR-binding peptide
GGGGNSSDDIYLISIPSQGTPVGGPGPTG

SEQ ID NO: 5808 - protein, 32 aa, Artificial Sequence
  Cyclic GFR-binding peptide
GGGGGGNSSDDIYLISIPSHHVRSGGGGWFWW

SEQ ID NO: 5809 - protein, 30 aa, Artificial Sequence
  Cyclic GFR-binding peptide
AAAANNSSDIYLISIPSLQVQTGGGPGPTG

SEQ ID NO: 5810 - protein, 29 aa, Artificial Sequence
  Cyclic GFR-binding peptide
AAAAAAVGMDDIFLISIPSLETPVGWFWW

SEQ ID NO: 5811 - protein, 27 aa, Artificial Sequence
  Cyclic GFR-binding peptide
GGGGVVGKDIFLISIPSMKTPVPGPTG

SEQ ID NO: 5812 - protein, 30 aa, Artificial Sequence
  Cyclic GFR-binding peptide
GGGGGGQQKDNIFLISIPSLKTPVGGWFWW

SEQ ID NO: 5813 - protein, 28 aa, Artificial Sequence
  Cyclic GFR-binding peptide
AAAANNAADIFLISIPSLQTPVGPGPTG

SEQ ID NO: 5814 - protein, 31 aa, Artificial Sequence
  Cyclic GFR-binding peptide
AAAAAANNASDIFLISIPSLRTPVGGGWFWW

SEQ ID NO: 5815 - protein, 29 aa, Artificial Sequence
  Cyclic GFR-binding peptide
GGGGNSSDDIFLISIPSTKTPVGGPGPTG

SEQ ID NO: 5816 - protein, 32 aa, Artificial Sequence
  Cyclic GFR-binding peptide
GGGGGGVRGNDIFLISIPSLATPVGGGGWFWW

SEQ ID NO: 5817 - protein, 30 aa, Artificial Sequence
  Cyclic GFR-binding peptide
AAAAPKRGVIFLISIPSLDTPVGGGPGPTG

SEQ ID NO: 5818 - protein, 29 aa, Artificial Sequence
  Cyclic GFR-binding peptide
AAAAAAPTKGIIFLISIPSMKEPVGWFWW

SEQ ID NO: 5819 - protein, 27 aa, Artificial Sequence
  Cyclic GFR-binding peptide
GGGGPTRGVIFLISIPSLKTPAPGPTG

SEQ ID NO: 5820 - protein, 30 aa, Artificial Sequence
  Cyclic GFR-binding peptide
GGGGGGHPKIRIFLISIPSLQTPAGGWFWW

SEQ ID NO: 5821 - protein, 28 aa, Artificial Sequence
  Cyclic GFR-binding peptide
AAAAHPKIRIFLISIPSMKTPTGPGPTG

SEQ ID NO: 5822 - protein, 31 aa, Artificial Sequence
  Cyclic GFR-binding peptide
AAAAAAHPKIRIFLISIPSLRAPVGGGWFWW

SEQ ID NO: 5823 - protein, 29 aa, Artificial Sequence
  Cyclic GFR-binding peptide
GGGGHPKIRIFLISIPSTKVPAGGPGPTG

SEQ ID NO: 5824 - protein, 32 aa, Artificial Sequence
  Cyclic GFR-binding peptide
GGGGGGKRVYEIFLISIPSLAQPVGGGGWFWW

SEQ ID NO: 5825 - protein, 30 aa, Artificial Sequence
  Cyclic GFR-binding peptide
AAAAKRVIEIFLISIPSLDQSVGGGPGPTG

SEQ ID NO: 5826 - protein, 27 aa, Artificial Sequence
  Cyclic GFR-binding peptide
GGGGKENEDIFLISIPSLDQPVGWFWW

SEQ ID NO: 5827 - protein, 29 aa, Artificial Sequence
  Cyclic GFR-binding peptide
GGGGGGNKNEDIFLISIPSHHVRSPGPTG

SEQ ID NO: 5828 - protein, 28 aa, Artificial Sequence
  Cyclic GFR-binding peptide
AAAAKDYEDIFLISIPSLQVQTGGWFWW

SEQ ID NO: 5829 - protein, 30 aa, Artificial Sequence
  Cyclic GFR-binding peptide
AAAAAANSSDDVYLMSLPKLEVPAGPGPTG

SEQ ID NO: 5830 - protein, 29 aa, Artificial Sequence
  Cyclic GFR-binding peptide
GGGGNSSDDVYLMSLPKMKVPAGGGWFWW

SEQ ID NO: 5831 - protein, 31 aa, Artificial Sequence
  Cyclic GFR-binding peptide
GGGGGGNSSDDVYLMSLPKLKVPAGGPGPTG

SEQ ID NO: 5832 - protein, 30 aa, Artificial Sequence
  Cyclic GFR-binding peptide
AAAANNSSDVYLMSLPKLQVPAGGGGWFWW

SEQ ID NO: 5833 - protein, 32 aa, Artificial Sequence
  Cyclic GFR-binding peptide
AAAAAAVGMDDVYLMSLPKLRVPAGGGPGPTG

SEQ ID NO: 5834 - protein, 27 aa, Artificial Sequence
  Cyclic GFR-binding peptide
GGGGVVGKDVYLMSLPKLAVPAGWFWW

SEQ ID NO: 5835 - protein, 29 aa, Artificial Sequence
  Cyclic GFR-binding peptide
GGGGGGQQKDNVYLMSLPKLDVPAPGPTG

SEQ ID NO: 5836 - protein, 28 aa, Artificial Sequence
  Cyclic GFR-binding peptide
AAAANNAADVYLMSLPKLETPVGGWFWW

SEQ ID NO: 5837 - protein, 30 aa, Artificial Sequence
  Cyclic GFR-binding peptide
AAAAAANNASDVYLMSLPKMKEPVGPGPTG

SEQ ID NO: 5838 - protein, 29 aa, Artificial Sequence
  Cyclic GFR-binding peptide
GGGGNSSDDVYLMSLPKLKTPAGGGWFWW

SEQ ID NO: 5839 - protein, 31 aa, Artificial Sequence
  Cyclic GFR-binding peptide
GGGGGGVRGNDVYLMSLPKLQTPAGGPGPTG

SEQ ID NO: 5840 - protein, 30 aa, Artificial Sequence
  Cyclic GFR-binding peptide
AAAAPKRGVVYLMSLPKLKTPVGGGGWFWW

SEQ ID NO: 5841 - protein, 32 aa, Artificial Sequence
  Cyclic GFR-binding peptide
AAAAAAPTKGIVYLMSLPKMKTPTGGGPGPTG

SEQ ID NO: 5842 - protein, 27 aa, Artificial Sequence
  Cyclic GFR-binding peptide
GGGGPTRGVVYLMSLPKLRAPVGWFWW

SEQ ID NO: 5843 - protein, 29 aa, Artificial Sequence
  Cyclic GFR-binding peptide
GGGGGGHPKIRVYLMSLPKLRTPVPGPTG

SEQ ID NO: 5844 - protein, 28 aa, Artificial Sequence
  Cyclic GFR-binding peptide
AAAAHPKIRVYLMSLPKLAQPVGGWFWW

SEQ ID NO: 5845 - protein, 30 aa, Artificial Sequence
  Cyclic GFR-binding peptide
AAAAAAHPKIRVYLMSLPKLDQSVGPGPTG

SEQ ID NO: 5846 - protein, 29 aa, Artificial Sequence
  Cyclic GFR-binding peptide
GGGGHPKIRVYLMSLPKLDQPVGGGWFWW

SEQ ID NO: 5847 - protein, 31 aa, Artificial Sequence
  Cyclic GFR-binding peptide
GGGGGGKRVYEVYLMSLPKEETPVGGPGPTG

SEQ ID NO: 5848 - protein, 30 aa, Artificial Sequence
  Cyclic GFR-binding peptide
AAAAKRVIEVYLMSLPKQGTPVGGGGWFWW

SEQ ID NO: 5849 - protein, 30 aa, Artificial Sequence
  Cyclic GFR-binding peptide
GGGGKENEDVYLMSLPKHHVRSGGGPGPTG

SEQ ID NO: 5850 - protein, 29 aa, Artificial Sequence
  Cyclic GFR-binding peptide
GGGGGGNKNEDVYLMSLPKLQVQTGWFWW

SEQ ID NO: 5851 - protein, 27 aa, Artificial Sequence
  Cyclic GFR-binding peptide
AAAAKDYEDYYVIPLPELEQPVPGPTG

SEQ ID NO: 5852 - protein, 30 aa, Artificial Sequence
  Cyclic GFR-binding peptide
AAAAAANSSDDYYVIPLPEMKQPVGGWFWW

SEQ ID NO: 5853 - protein, 28 aa, Artificial Sequence
  Cyclic GFR-binding peptide
GGGGNSSDDYYVIPLPELKQPVGPGPTG

SEQ ID NO: 5854 - protein, 31 aa, Artificial Sequence
  Cyclic GFR-binding peptide
GGGGGGNSSDDYYVIPLPELQQPVGGGWFWW

SEQ ID NO: 5855 - protein, 29 aa, Artificial Sequence
  Cyclic GFR-binding peptide
AAAANNSSDYYVIPLPELRQPVGGPGPTG

SEQ ID NO: 5856 - protein, 32 aa, Artificial Sequence
  Cyclic GFR-binding peptide
AAAAAAVGMDDYYVIPLPETKQPVGGGGWFWW

SEQ ID NO: 5857 - protein, 30 aa, Artificial Sequence
  Cyclic GFR-binding peptide
GGGGVVGKDYYVIPLPELDQPVGGGPGPTG

SEQ ID NO: 5858 - protein, 29 aa, Artificial Sequence
  Cyclic GFR-binding peptide
GGGGGGQQKDNYYVIPLPELETPVGWFWW

SEQ ID NO: 5859 - protein, 27 aa, Artificial Sequence
  Cyclic GFR-binding peptide
AAAANNAADYYVIPLPEMKEPVPGPTG

SEQ ID NO: 5860 - protein, 30 aa, Artificial Sequence
  Cyclic GFR-binding peptide
AAAAAANNASDYYVIPLPELKTPAGGWFWW

SEQ ID NO: 5861 - protein, 28 aa, Artificial Sequence
  Cyclic GFR-binding peptide
GGGGNSSDDYYVIPLPELQTPAGPGPTG

SEQ ID NO: 5862 - protein, 31 aa, Artificial Sequence
  Cyclic GFR-binding peptide
GGGGGGVRGNDYYVIPLPELKTPVGGGWFWW

SEQ ID NO: 5863 - protein, 29 aa, Artificial Sequence
  Cyclic GFR-binding peptide
AAAAPKRGVYYVIPLPEMKTPTGGPGPTG

SEQ ID NO: 5864 - protein, 32 aa, Artificial Sequence
  Cyclic GFR-binding peptide
AAAAAAPTKGIYYVIPLPELRAPVGGGGWFWW

SEQ ID NO: 5865 - protein, 30 aa, Artificial Sequence
  Cyclic GFR-binding peptide
GGGGPTRGVYYVIPLPELRTPVGGGPGPTG

SEQ ID NO: 5866 - protein, 29 aa, Artificial Sequence
  Cyclic GFR-binding peptide
GGGGGGHPKIRYYVIPLPETKVPAGWFWW

SEQ ID NO: 5867 - protein, 27 aa, Artificial Sequence
  Cyclic GFR-binding peptide
AAAAHPKIRYYVIPLPELDQSVPGPTG

SEQ ID NO: 5868 - protein, 30 aa, Artificial Sequence
  Cyclic GFR-binding peptide
AAAAAAHPKIRYYVIPLPEEETPVGGWFWW

SEQ ID NO: 5869 - protein, 28 aa, Artificial Sequence
  Cyclic GFR-binding peptide
GGGGHPKIRYYVIPLPEQGTPVGPGPTG

SEQ ID NO: 5870 - protein, 31 aa, Artificial Sequence
  Cyclic GFR-binding peptide
GGGGGGKRVYEYYVIPLPEHHVRSGGGWFWW

SEQ ID NO: 5871 - protein, 29 aa, Artificial Sequence
  Cyclic GFR-binding peptide
AAAAKRVIEYYVIPLPELQVQTGGPGPTG

SEQ ID NO: 5872 - protein, 30 aa, Artificial Sequence
  Cyclic GFR-binding peptide
GGGGKENEDYYLITLPELEQSVGGGGWFWW

SEQ ID NO: 5873 - protein, 32 aa, Artificial Sequence
  Cyclic GFR-binding peptide
GGGGGGNKNEDYYLITLPEMKQSVGGGPGPTG

SEQ ID NO: 5874 - protein, 27 aa, Artificial Sequence
  Cyclic GFR-binding peptide
AAAAKDYEDYYLITLPELKQSVGWFWW

SEQ ID NO: 5875 - protein, 29 aa, Artificial Sequence
  Cyclic GFR-binding peptide
AAAAAANSSDDYYLITLPELQQSVPGPTG

SEQ ID NO: 5876 - protein, 28 aa, Artificial Sequence
  Cyclic GFR-binding peptide
GGGGNSSDDYYLITLPELRQSVGGWFWW

SEQ ID NO: 5877 - protein, 30 aa, Artificial Sequence
  Cyclic GFR-binding peptide
GGGGGGNSSDDYYLITLPETKQSVGPGPTG

SEQ ID NO: 5878 - protein, 29 aa, Artificial Sequence
  Cyclic GFR-binding peptide
AAAANNSSDYYLITLPELAQSVGGGWFWW

SEQ ID NO: 5879 - protein, 31 aa, Artificial Sequence
  Cyclic GFR-binding peptide
AAAAAAVGMDDYYLITLPELDQSVGGPGPTG

SEQ ID NO: 5880 - protein, 30 aa, Artificial Sequence
  Cyclic GFR-binding peptide
GGGGVVGKDYYLITLPELETPVGGGGWFWW

SEQ ID NO: 5881 - protein, 32 aa, Artificial Sequence
  Cyclic GFR-binding peptide
GGGGGGQQKDNYYLITLPEMKEPVGGGPGPTG

SEQ ID NO: 5882 - protein, 27 aa, Artificial Sequence
  Cyclic GFR-binding peptide
AAAANNAADYYLITLPELKTPAGWFWW

SEQ ID NO: 5883 - protein, 29 aa, Artificial Sequence
  Cyclic GFR-binding peptide
AAAAAANNASDYYLITLPELQTPAPGPTG

SEQ ID NO: 5884 - protein, 28 aa, Artificial Sequence
  Cyclic GFR-binding peptide
GGGGNSSDDYYLITLPELKTPVGGWFWW

SEQ ID NO: 5885 - protein, 30 aa, Artificial Sequence
  Cyclic GFR-binding peptide
GGGGGGVRGNDYYLITLPEMKTPTGPGPTG

SEQ ID NO: 5886 - protein, 29 aa, Artificial Sequence
  Cyclic GFR-binding peptide
AAAAPKRGVYYLITLPELRAPVGGGWFWW

SEQ ID NO: 5887 - protein, 31 aa, Artificial Sequence
  Cyclic GFR-binding peptide
AAAAAAPTKGIYYLITLPELRTPVGGPGPTG

SEQ ID NO: 5888 - protein, 30 aa, Artificial Sequence
  Cyclic GFR-binding peptide
GGGGPTRGVYYLITLPETKVPAGGGGWFWW

SEQ ID NO: 5889 - protein, 32 aa, Artificial Sequence
  Cyclic GFR-binding peptide
GGGGGGHPKIRYYLITLPELAQPVGGGPGPTG

SEQ ID NO: 5890 - protein, 27 aa, Artificial Sequence
  Cyclic GFR-binding peptide
AAAAHPKIRYYLITLPEEETPVGWFWW

SEQ ID NO: 5891 - protein, 29 aa, Artificial Sequence
  Cyclic GFR-binding peptide
AAAAAAHPKIRYYLITLPEQGTPVPGPTG

SEQ ID NO: 5892 - protein, 28 aa, Artificial Sequence
  Cyclic GFR-binding peptide
GGGGHPKIRYYLITLPEHHVRSGGWFWW

SEQ ID NO: 5893 - protein, 30 aa, Artificial Sequence
  Cyclic GFR-binding peptide
GGGGGGKRVYEYYLITLPELQVQTGPGPTG

SEQ ID NO: 5894 - protein, 29 aa, Artificial Sequence
  Cyclic GFR-binding peptide
AAAAKRVIEYYLITLPELEQPVGGGWFWW

SEQ ID NO: 5895 - protein, 29 aa, Artificial Sequence
  Cyclic GFR-binding peptide
GGGGKENEDYYLITLPEMKQPVGGPGPTG

SEQ ID NO: 5896 - protein, 32 aa, Artificial Sequence
  Cyclic GFR-binding peptide
GGGGGGNKNEDYYLITLPELKQPVGGGGWFWW

SEQ ID NO: 5897 - protein, 30 aa, Artificial Sequence
  Cyclic GFR-binding peptide
AAAAKDYEDYYLITLPELQQPVGGGPGPTG

SEQ ID NO: 5898 - protein, 29 aa, Artificial Sequence
  Cyclic GFR-binding peptide
AAAAAANSSDDYYLITLPELRQPVGWFWW

SEQ ID NO: 5899 - protein, 27 aa, Artificial Sequence
  Cyclic GFR-binding peptide
GGGGNSSDDYYLITLPETKQPVPGPTG

SEQ ID NO: 5900 - protein, 30 aa, Artificial Sequence
  Cyclic GFR-binding peptide
GGGGGGNSSDDYYLITLPELDQPVGGWFWW

SEQ ID NO: 5901 - protein, 28 aa, Artificial Sequence
  Cyclic GFR-binding peptide
AAAANNSSDMIQMTINSQGTPVGPGPTG

SEQ ID NO: 5902 - protein, 31 aa, Artificial Sequence
  Cyclic GFR-binding peptide
AAAAAAVGMDDMIQMTINSMKEPVGGGWFWW

SEQ ID NO: 5903 - protein, 29 aa, Artificial Sequence
  Cyclic GFR-binding peptide
GGGGVVGKDMIQMTINSLKTPAGGPGPTG

SEQ ID NO: 5904 - protein, 32 aa, Artificial Sequence
  Cyclic GFR-binding peptide
GGGGGGQQKDNMIQMTINSLQTPAGGGGWFWW

SEQ ID NO: 5905 - protein, 30 aa, Artificial Sequence
  Cyclic GFR-binding peptide
AAAANNAADMIQMTINSMKTPTGGGPGPTG

SEQ ID NO: 5906 - protein, 29 aa, Artificial Sequence
  Cyclic GFR-binding peptide
AAAAAANNASDMIQMTINSLRAPVGWFWW

SEQ ID NO: 5907 - protein, 27 aa, Artificial Sequence
  Cyclic GFR-binding peptide
GGGGNSSDDMIQMTINSTKVPAPGPTG

SEQ ID NO: 5908 - protein, 30 aa, Artificial Sequence
  Cyclic GFR-binding peptide
GGGGGGVRGNDMIQMTINSLAQPVGGWFWW

SEQ ID NO: 5909 - protein, 28 aa, Artificial Sequence
  Cyclic GFR-binding peptide
AAAAPKRGVMIQMTINSLDQSVGPGPTG

SEQ ID NO: 5910 - protein, 31 aa, Artificial Sequence
  Cyclic GFR-binding peptide
AAAAAAPTKGIMIQMTINSLDQPVGGGWFWW

SEQ ID NO: 5911 - protein, 29 aa, Artificial Sequence
  Cyclic GFR-binding peptide
GGGGPTRGVMIQMTINSHHVRSGGPGPTG

SEQ ID NO: 5912 - protein, 32 aa, Artificial Sequence
  Cyclic GFR-binding peptide
GGGGGGHPKIRMIQMTINSLQVQTGGGGWFWW

SEQ ID NO: 5913 - protein, 30 aa, Artificial Sequence
  Cyclic GFR-binding peptide
AAAAHPKIRVKAVKVSRLQVRSGGGPGPTG

SEQ ID NO: 5914 - protein, 29 aa, Artificial Sequence
  Cyclic GFR-binding peptide
AAAAAAHPKIRVKAVKVSRLETPVGWFWW

SEQ ID NO: 5915 - protein, 27 aa, Artificial Sequence
  Cyclic GFR-binding peptide
GGGGHPKIRVKAVKVSRMKEPVPGPTG

SEQ ID NO: 5916 - protein, 30 aa, Artificial Sequence
  Cyclic GFR-binding peptide
GGGGGGKRVYEVKAVKVSRLKTPAGGWFWW

SEQ ID NO: 5917 - protein, 28 aa, Artificial Sequence
  Cyclic GFR-binding peptide
AAAAKRVIEVKAVKVSRLQTPAGPGPTG

SEQ ID NO: 5918 - protein, 29 aa, Artificial Sequence
  Cyclic GFR-binding peptide
GGGGKENEDVKAVKVSRLKTPVGGGWFWW

SEQ ID NO: 5919 - protein, 31 aa, Artificial Sequence
  Cyclic GFR-binding peptide
GGGGGGNKNEDVKAVKVSRMKTPTGGPGPTG

SEQ ID NO: 5920 - protein, 30 aa, Artificial Sequence
  Cyclic GFR-binding peptide
AAAAKDYEDVKAVKVSRLRAPVGGGGWFWW

SEQ ID NO: 5921 - protein, 32 aa, Artificial Sequence
  Cyclic GFR-binding peptide
AAAAAANSSDDVKAVKVSRLRTPVGGGPGPTG

SEQ ID NO: 5922 - protein, 27 aa, Artificial Sequence
  Cyclic GFR-binding peptide
GGGGNSSDDVKAVKVSRTKVPAGWFWW

SEQ ID NO: 5923 - protein, 29 aa, Artificial Sequence
  Cyclic GFR-binding peptide
GGGGGGNSSDDVKAVKVSRLAQPVPGPTG

SEQ ID NO: 5924 - protein, 28 aa, Artificial Sequence
  Cyclic GFR-binding peptide
AAAANNSSDVKAVKVSRLDQSVGGWFWW

SEQ ID NO: 5925 - protein, 30 aa, Artificial Sequence
  Cyclic GFR-binding peptide
AAAAAAVGMDDVKAVKVSRLDQPVGPGPTG

SEQ ID NO: 5926 - protein, 29 aa, Artificial Sequence
  Cyclic GFR-binding peptide
GGGGVVGKDVKAVKVSREETPVGGGWFWW

SEQ ID NO: 5927 - protein, 31 aa, Artificial Sequence
  Cyclic GFR-binding peptide
GGGGGGQQKDNVKAVKVSRQGTPVGGPGPTG

SEQ ID NO: 5928 - protein, 30 aa, Artificial Sequence
  Cyclic GFR-binding peptide
AAAANNAADVKAVKVSRLQVQTGGGGWFWW

SEQ ID NO: 5929 - protein, 32 aa, Artificial Sequence
  Cyclic GFR-binding peptide
AAAAAANNASDIKRVQVPRHHVQTGGGPGPTG

SEQ ID NO: 5930 - protein, 27 aa, Artificial Sequence
  Cyclic GFR-binding peptide
GGGGNSSDDIKRVQVPRLETPVGWFWW

SEQ ID NO: 5931 - protein, 29 aa, Artificial Sequence
  Cyclic GFR-binding peptide
GGGGGGVRGNDIKRVQVPRMKEPVPGPTG

SEQ ID NO: 5932 - protein, 28 aa, Artificial Sequence
  Cyclic GFR-binding peptide
AAAAPKRGVIKRVQVPRLKTPAGGWFWW

SEQ ID NO: 5933 - protein, 30 aa, Artificial Sequence
  Cyclic GFR-binding peptide
AAAAAAPTKGIIKRVQVPRLQTPAGPGPTG

SEQ ID NO: 5934 - protein, 29 aa, Artificial Sequence
  Cyclic GFR-binding peptide
GGGGPTRGVIKRVQVPRLKTPVGGGWFWW

SEQ ID NO: 5935 - protein, 31 aa, Artificial Sequence
  Cyclic GFR-binding peptide
GGGGGGHPKIRIKRVQVPRMKTPTGGPGPTG

SEQ ID NO: 5936 - protein, 30 aa, Artificial Sequence
  Cyclic GFR-binding peptide
AAAAHPKIRIKRVQVPRLRAPVGGGGWFWW

SEQ ID NO: 5937 - protein, 32 aa, Artificial Sequence
  Cyclic GFR-binding peptide
AAAAAAHPKIRIKRVQVPRLRTPVGGGPGPTG

SEQ ID NO: 5938 - protein, 27 aa, Artificial Sequence
  Cyclic GFR-binding peptide
GGGGHPKIRIKRVQVPRTKVPAGWFWW

SEQ ID NO: 5939 - protein, 29 aa, Artificial Sequence
  Cyclic GFR-binding peptide
GGGGGGKRVYEIKRVQVPRLAQPVPGPTG

SEQ ID NO: 5940 - protein, 28 aa, Artificial Sequence
  Cyclic GFR-binding peptide
AAAAKRVIEIKRVQVPRLDQSVGGWFWW

SEQ ID NO: 5941 - protein, 28 aa, Artificial Sequence
  Cyclic GFR-binding peptide
GGGGKENEDIKRVQVPRLDQPVGPGPTG

SEQ ID NO: 5942 - protein, 31 aa, Artificial Sequence
  Cyclic GFR-binding peptide
GGGGGGNKNEDIKRVQVPREETPVGGGWFWW

SEQ ID NO: 5943 - protein, 29 aa, Artificial Sequence
  Cyclic GFR-binding peptide
AAAAKDYEDIKRVQVPRQGTPVGGPGPTG

SEQ ID NO: 5944 - protein, 32 aa, Artificial Sequence
  Cyclic GFR-binding peptide
AAAAAANSSDDIKRVQVPRHHVRSGGGGWFWW

SEQ ID NO: 5945 - protein, 27 aa, Artificial Sequence
  Cyclic GFR-binding peptide
GGGGVVKENEDLYLISIASGGGPGPTG

SEQ ID NO: 5946 - protein, 26 aa, Artificial Sequence
  Cyclic GFR-binding peptide
GGGGGGVVNKNEDLYLVSIASGWFWW

SEQ ID NO: 5947 - protein, 24 aa, Artificial Sequence
  Cyclic GFR-binding peptide
AAAAVVKDYEDFFLMSLSSPGPTG

SEQ ID NO: 5948 - protein, 27 aa, Artificial Sequence
  Cyclic GFR-binding peptide
AAAAAAIVNSSDDFFLVSLSSGGWFWW

SEQ ID NO: 5949 - protein, 25 aa, Artificial Sequence
  Cyclic GFR-binding peptide
GGGGIVNSSDDFYLMSIANGPGPTG

SEQ ID NO: 5950 - protein, 28 aa, Artificial Sequence
  Cyclic GFR-binding peptide
GGGGGGIVNSSDDFYLISIANGGGWFWW

SEQ ID NO: 5951 - protein, 26 aa, Artificial Sequence
  Cyclic GFR-binding peptide
AAAAIVNNSSDYYLMSTASGGPGPTG

SEQ ID NO: 5952 - protein, 29 aa, Artificial Sequence
  Cyclic GFR-binding peptide
AAAAAATPVGMDDYYLISTASGGGGWFWW

SEQ ID NO: 5953 - protein, 27 aa, Artificial Sequence
  Cyclic GFR-binding peptide
GGGGYTVVGKDKYLMSIPSGGGPGPTG

SEQ ID NO: 5954 - protein, 26 aa, Artificial Sequence
  Cyclic GFR-binding peptide
GGGGGGIIQQKDNKYLISIPSGWFWW

SEQ ID NO: 5955 - protein, 24 aa, Artificial Sequence
  Cyclic GFR-binding peptide
AAAAVVNNAADLYLMSIPEPGPTG

SEQ ID NO: 5956 - protein, 27 aa, Artificial Sequence
  Cyclic GFR-binding peptide
AAAAAAVVNNASDLYLVSIPEGGWFWW

SEQ ID NO: 5957 - protein, 25 aa, Artificial Sequence
  Cyclic GFR-binding peptide
GGGGIVNSSDDFYLINIPSGPGPTG

SEQ ID NO: 5958 - protein, 28 aa, Artificial Sequence
  Cyclic GFR-binding peptide
GGGGGGLLVRGNDFYLVNIPSGGGWFWW

SEQ ID NO: 5959 - protein, 26 aa, Artificial Sequence
  Cyclic GFR-binding peptide
AAAAVKPKRGVIYLMSIPSGGPGPTG

SEQ ID NO: 5960 - protein, 29 aa, Artificial Sequence
  Cyclic GFR-binding peptide
AAAAAAIKPTKGIIYLVSIPSGGGGWFWW

SEQ ID NO: 5961 - protein, 27 aa, Artificial Sequence
  Cyclic GFR-binding peptide
GGGGVKPTRGVIFLMSIPSGGGPGPTG

SEQ ID NO: 5962 - protein, 28 aa, Artificial Sequence
  Cyclic GFR-binding peptide
GGGGGGHQGQHPKIRIFLVSIPSGWFWW

SEQ ID NO: 5963 - protein, 26 aa, Artificial Sequence
  Cyclic GFR-binding peptide
AAAAHQGQHPKIRVYLISLPKPGPTG

SEQ ID NO: 5964 - protein, 29 aa, Artificial Sequence
  Cyclic GFR-binding peptide
AAAAAAHQGQHPKIRVYLVSLPKGGWFWW

SEQ ID NO: 5965 - protein, 27 aa, Artificial Sequence
  Cyclic GFR-binding peptide
GGGGHQGQHPKIRYYVMPLPEGPGPTG

SEQ ID NO: 5966 - protein, 30 aa, Artificial Sequence
  Cyclic GFR-binding peptide
GGGGGGLKPKKRVYEYYVVPLPEGGGWFWW

SEQ ID NO: 5967 - protein, 28 aa, Artificial Sequence
  Cyclic GFR-binding peptide
AAAAFIPKKRVIEYYLMTLPEGGPGPTG

SEQ ID NO: 5968 - protein, 29 aa, Artificial Sequence
  Cyclic GFR-binding peptide
AAAAAAVVKENEDYYLVTLPEGGGGWFWW

SEQ ID NO: 5969 - protein, 27 aa, Artificial Sequence
  Cyclic GFR-binding peptide
GGGGVVNKNEDMIQITINSGGGPGPTG

SEQ ID NO: 5970 - protein, 26 aa, Artificial Sequence
  Cyclic GFR-binding peptide
GGGGGGVVKDYEDMIQVTINSGWFWW

SEQ ID NO: 5971 - protein, 24 aa, Artificial Sequence
  Cyclic GFR-binding peptide
AAAAIVNSSDDVKAMKVSRPGPTG

SEQ ID NO: 5972 - protein, 27 aa, Artificial Sequence
  Cyclic GFR-binding peptide
AAAAAAIVNSSDDVKAIKVSRGGWFWW

SEQ ID NO: 5973 - protein, 25 aa, Artificial Sequence
  Cyclic GFR-binding peptide
GGGGIVNSSDDIKRMQVPRGPGPTG

SEQ ID NO: 5974 - protein, 28 aa, Artificial Sequence
  Cyclic GFR-binding peptide
GGGGGGIVNNSSDIKRIQVPRGGGWFWW

SEQ ID NO: 5975 - protein, 26 aa, Artificial Sequence
  Cyclic GFR-binding peptide
AAAATPVGMDDLYLMSIASGGPGPTG

SEQ ID NO: 5976 - protein, 29 aa, Artificial Sequence
  Cyclic GFR-binding peptide
AAAAAAYTVVGKDFFLISLSSGGGGWFWW

SEQ ID NO: 5977 - protein, 27 aa, Artificial Sequence
  Cyclic GFR-binding peptide
GGGGIIQQKDNFYLVSIANGGGPGPTG

SEQ ID NO: 5978 - protein, 26 aa, Artificial Sequence
  Cyclic GFR-binding peptide
GGGGGGVVNNAADYYLVSTASGWFWW

SEQ ID NO: 5979 - protein, 24 aa, Artificial Sequence
  Cyclic GFR-binding peptide
AAAAVVNNASDKYLVSIPSPGPTG

SEQ ID NO: 5980 - protein, 27 aa, Artificial Sequence
  Cyclic GFR-binding peptide
AAAAAAIVNSSDDLYLISIPEGGWFWW

SEQ ID NO: 5981 - protein, 25 aa, Artificial Sequence
  Cyclic GFR-binding peptide
GGGGLLVRGNDFYLMNIPSGPGPTG

SEQ ID NO: 5982 - protein, 28 aa, Artificial Sequence
  Cyclic GFR-binding peptide
GGGGGGVKPKRGVIYLISIPSGGGWFWW

SEQ ID NO: 5983 - protein, 26 aa, Artificial Sequence
  Cyclic GFR-binding peptide
AAAAIKPTKGIIFLISIPSGGPGPTG

SEQ ID NO: 5984 - protein, 29 aa, Artificial Sequence
  Cyclic GFR-binding peptide
AAAAAAVKPTRGVVYLMSLPKGGGGWFWW

SEQ ID NO: 5985 - protein, 29 aa, Artificial Sequence
  Cyclic GFR-binding peptide
GGGGHQGQHPKIRYYVIPLPEGGGPGPTG

SEQ ID NO: 5986 - protein, 28 aa, Artificial Sequence
  Cyclic GFR-binding peptide
GGGGGGHQGQHPKIRYYLITLPEGWFWW

SEQ ID NO: 5987 - protein, 26 aa, Artificial Sequence
  Cyclic GFR-binding peptide
AAAAHQGQHPKIRMIQMTINSPGPTG

SEQ ID NO: 5988 - protein, 29 aa, Artificial Sequence
  Cyclic GFR-binding peptide
AAAAAAHQGQHPKIRVKAVKVSRGGWFWW

SEQ ID NO: 5989 - protein, 27 aa, Artificial Sequence
  Cyclic GFR-binding peptide
GGGGLKPKKRVYEIKRVQVPRGPGPTG

SEQ ID NO: 5990 - protein, 20 aa, Artificial Sequence
  Cyclic GFR-binding peptide
GGGGLYLISIASGGGPGPTG

SEQ ID NO: 5991 - protein, 19 aa, Artificial Sequence
  Cyclic GFR-binding peptide
GGGGGGLYLVSIASGWFWW

SEQ ID NO: 5992 - protein, 17 aa, Artificial Sequence
  Cyclic GFR-binding peptide
AAAAFFLMSLSSPGPTG

SEQ ID NO: 5993 - protein, 20 aa, Artificial Sequence
  Cyclic GFR-binding peptide
AAAAAAFFLVSLSSGGWFWW

SEQ ID NO: 5994 - protein, 18 aa, Artificial Sequence
  Cyclic GFR-binding peptide
GGGGFYLMSIANGPGPTG

SEQ ID NO: 5995 - protein, 21 aa, Artificial Sequence
  Cyclic GFR-binding peptide
GGGGGGFYLISIANGGGWFWW

SEQ ID NO: 5996 - protein, 19 aa, Artificial Sequence
  Cyclic GFR-binding peptide
AAAAYYLMSTASGGPGPTG

SEQ ID NO: 5997 - protein, 22 aa, Artificial Sequence
  Cyclic GFR-binding peptide
AAAAAAYYLISTASGGGGWFWW

SEQ ID NO: 5998 - protein, 20 aa, Artificial Sequence
  Cyclic GFR-binding peptide
GGGGKYLMSIPSGGGPGPTG

SEQ ID NO: 5999 - protein, 19 aa, Artificial Sequence
  Cyclic GFR-binding peptide
GGGGGGKYLISIPSGWFWW

SEQ ID NO: 6000 - protein, 17 aa, Artificial Sequence
  Cyclic GFR-binding peptide
AAAALYLMSIPEPGPTG

SEQ ID NO: 6001 - protein, 20 aa, Artificial Sequence
  Cyclic GFR-binding peptide
AAAAAALYLVSIPEGGWFWW

SEQ ID NO: 6002 - protein, 18 aa, Artificial Sequence
  Cyclic GFR-binding peptide
GGGGFYLINIPSGPGPTG

SEQ ID NO: 6003 - protein, 21 aa, Artificial Sequence
  Cyclic GFR-binding peptide
GGGGGGFYLVNIPSGGGWFWW

SEQ ID NO: 6004 - protein, 19 aa, Artificial Sequence
  Cyclic GFR-binding peptide
AAAAIYLMSIPSGGPGPTG

SEQ ID NO: 6005 - protein, 22 aa, Artificial Sequence
  Cyclic GFR-binding peptide
AAAAAAIYLVSIPSGGGGWFWW

SEQ ID NO: 6006 - protein, 20 aa, Artificial Sequence
  Cyclic GFR-binding peptide
GGGGIFLMSIPSGGGPGPTG

SEQ ID NO: 6007 - protein, 19 aa, Artificial Sequence
  Cyclic GFR-binding peptide
GGGGGGIFLVSIPSGWFWW

SEQ ID NO: 6008 - protein, 17 aa, Artificial Sequence
  Cyclic GFR-binding peptide
AAAAVYLISLPKPGPTG

SEQ ID NO: 6009 - protein, 20 aa, Artificial Sequence
  Cyclic GFR-binding peptide
AAAAAAVYLVSLPKGGWFWW

SEQ ID NO: 6010 - protein, 18 aa, Artificial Sequence
  Cyclic GFR-binding peptide
GGGGYYVMPLPEGPGPTG

SEQ ID NO: 6011 - protein, 21 aa, Artificial Sequence
  Cyclic GFR-binding peptide
GGGGGGYYVVPLPEGGGWFWW

SEQ ID NO: 6012 - protein, 19 aa, Artificial Sequence
  Cyclic GFR-binding peptide
AAAAYYLMTLPEGGPGPTG

SEQ ID NO: 6013 - protein, 22 aa, Artificial Sequence
  Cyclic GFR-binding peptide
AAAAAAYYLVTLPEGGGGWFWW

SEQ ID NO: 6014 - protein, 20 aa, Artificial Sequence
  Cyclic GFR-binding peptide
GGGGMIQITINSGGGPGPTG

SEQ ID NO: 6015 - protein, 19 aa, Artificial Sequence
  Cyclic GFR-binding peptide
GGGGGGMIQVTINSGWFWW

SEQ ID NO: 6016 - protein, 17 aa, Artificial Sequence
  Cyclic GFR-binding peptide
AAAAVKAMKVSRPGPTG

SEQ ID NO: 6017 - protein, 20 aa, Artificial Sequence
  Cyclic GFR-binding peptide
AAAAAAVKAIKVSRGGWFWW

SEQ ID NO: 6018 - protein, 18 aa, Artificial Sequence
  Cyclic GFR-binding peptide
GGGGIKRMQVPRGPGPTG

SEQ ID NO: 6019 - protein, 21 aa, Artificial Sequence
  Cyclic GFR-binding peptide
GGGGGGIKRIQVPRGGGWFWW

SEQ ID NO: 6020 - protein, 19 aa, Artificial Sequence
  Cyclic GFR-binding peptide
AAAALYLMSIASGGPGPTG

SEQ ID NO: 6021 - protein, 22 aa, Artificial Sequence
  Cyclic GFR-binding peptide
AAAAAAFFLISLSSGGGGWFWW

SEQ ID NO: 6022 - protein, 20 aa, Artificial Sequence
  Cyclic GFR-binding peptide
GGGGFYLVSIANGGGPGPTG

SEQ ID NO: 6023 - protein, 19 aa, Artificial Sequence
  Cyclic GFR-binding peptide
GGGGGGYYLVSTASGWFWW

SEQ ID NO: 6024 - protein, 17 aa, Artificial Sequence
  Cyclic GFR-binding peptide
AAAAKYLVSIPSPGPTG

SEQ ID NO: 6025 - protein, 20 aa, Artificial Sequence
  Cyclic GFR-binding peptide
AAAAAALYLISIPEGGWFWW

SEQ ID NO: 6026 - protein, 18 aa, Artificial Sequence
  Cyclic GFR-binding peptide
GGGGFYLMNIPSGPGPTG

SEQ ID NO: 6027 - protein, 21 aa, Artificial Sequence
  Cyclic GFR-binding peptide
GGGGGGIYLISIPSGGGWFWW

SEQ ID NO: 6028 - protein, 19 aa, Artificial Sequence
  Cyclic GFR-binding peptide
AAAAIFLISIPSGGPGPTG

SEQ ID NO: 6029 - protein, 22 aa, Artificial Sequence
  Cyclic GFR-binding peptide
AAAAAAVYLMSLPKGGGGWFWW

SEQ ID NO: 6030 - protein, 20 aa, Artificial Sequence
  Cyclic GFR-binding peptide
GGGGYYVIPLPEGGGPGPTG

SEQ ID NO: 6031 - protein, 19 aa, Artificial Sequence
  Cyclic GFR-binding peptide
GGGGGGYYLITLPEGWFWW

SEQ ID NO: 6032 - protein, 17 aa, Artificial Sequence
  Cyclic GFR-binding peptide
AAAAMIQMTINSPGPTG

SEQ ID NO: 6033 - protein, 20 aa, Artificial Sequence
  Cyclic GFR-binding peptide
AAAAAAVKAVKVSRGGWFWW

SEQ ID NO: 6034 - protein, 18 aa, Artificial Sequence
  Cyclic GFR-binding peptide
GGGGIKRVQVPRGPGPTG

SEQ ID NO: 6035 - protein, 15 aa, Artificial Sequence
  Cyclic GFR-binding peptide
GGGGGGGLYLISIAS

SEQ ID NO: 6036 - protein, 16 aa, Artificial Sequence
  Cyclic GFR-binding peptide
GGGGGGGGLYLVSIAS

SEQ ID NO: 6037 - protein, 15 aa, Artificial Sequence
  Cyclic GFR-binding peptide
AAAAAAAFFLMSLSS

SEQ ID NO: 6038 - protein, 16 aa, Artificial Sequence
  Cyclic GFR-binding peptide
AAAAAAAAFFLVSLSS

SEQ ID NO: 6039 - protein, 15 aa, Artificial Sequence
  Cyclic GFR-binding peptide
GGGGGGGFYLMSIAN

SEQ ID NO: 6040 - protein, 16 aa, Artificial Sequence
  Cyclic GFR-binding peptide
GGGGGGGGFYLISIAN

SEQ ID NO: 6041 - protein, 15 aa, Artificial Sequence
  Cyclic GFR-binding peptide
AAAAAAAYYLMSTAS

SEQ ID NO: 6042 - protein, 16 aa, Artificial Sequence
  Cyclic GFR-binding peptide
AAAAAAAAYYLISTAS

SEQ ID NO: 6043 - protein, 15 aa, Artificial Sequence
  Cyclic GFR-binding peptide
GGGGGGGKYLMSIPS

SEQ ID NO: 6044 - protein, 16 aa, Artificial Sequence
  Cyclic GFR-binding peptide
GGGGGGGGKYLISIPS

SEQ ID NO: 6045 - protein, 15 aa, Artificial Sequence
  Cyclic GFR-binding peptide
AAAAAAALYLMSIPE

SEQ ID NO: 6046 - protein, 16 aa, Artificial Sequence
  Cyclic GFR-binding peptide
AAAAAAAALYLVSIPE

SEQ ID NO: 6047 - protein, 15 aa, Artificial Sequence
  Cyclic GFR-binding peptide
GGGGGGGFYLINIPS

SEQ ID NO: 6048 - protein, 16 aa, Artificial Sequence
  Cyclic GFR-binding peptide
GGGGGGGGFYLVNIPS

SEQ ID NO: 6049 - protein, 15 aa, Artificial Sequence
  Cyclic GFR-binding peptide
AAAAAAAIYLMSIPS

SEQ ID NO: 6050 - protein, 16 aa, Artificial Sequence
  Cyclic GFR-binding peptide
AAAAAAAAIYLVSIPS

SEQ ID NO: 6051 - protein, 15 aa, Artificial Sequence
  Cyclic GFR-binding peptide
GGGGGGGIFLMSIPS

SEQ ID NO: 6052 - protein, 16 aa, Artificial Sequence
  Cyclic GFR-binding peptide
GGGGGGGGIFLVSIPS

SEQ ID NO: 6053 - protein, 15 aa, Artificial Sequence
  Cyclic GFR-binding peptide
AAAAAAAVYLISLPK

SEQ ID NO: 6054 - protein, 16 aa, Artificial Sequence
  Cyclic GFR-binding peptide
AAAAAAAAVYLVSLPK

SEQ ID NO: 6055 - protein, 15 aa, Artificial Sequence
  Cyclic GFR-binding peptide
GGGGGGGYYVMPLPE

SEQ ID NO: 6056 - protein, 16 aa, Artificial Sequence
  Cyclic GFR-binding peptide
GGGGGGGGYYVVPLPE

SEQ ID NO: 6057 - protein, 15 aa, Artificial Sequence
  Cyclic GFR-binding peptide
AAAAAAAYYLMTLPE

SEQ ID NO: 6058 - protein, 16 aa, Artificial Sequence
  Cyclic GFR-binding peptide
AAAAAAAAYYLVTLPE

SEQ ID NO: 6059 - protein, 15 aa, Artificial Sequence
  Cyclic GFR-binding peptide
GGGGGGGMIQITINS

SEQ ID NO: 6060 - protein, 16 aa, Artificial Sequence
  Cyclic GFR-binding peptide
GGGGGGGGMIQVTINS

SEQ ID NO: 6061 - protein, 15 aa, Artificial Sequence
  Cyclic GFR-binding peptide
AAAAAAAVKAMKVSR

SEQ ID NO: 6062 - protein, 16 aa, Artificial Sequence
  Cyclic GFR-binding peptide
AAAAAAAAVKAIKVSR

SEQ ID NO: 6063 - protein, 15 aa, Artificial Sequence
  Cyclic GFR-binding peptide
GGGGGGGIKRMQVPR

SEQ ID NO: 6064 - protein, 16 aa, Artificial Sequence
  Cyclic GFR-binding peptide
GGGGGGGGIKRIQVPR

SEQ ID NO: 6065 - protein, 15 aa, Artificial Sequence
  Cyclic GFR-binding peptide
AAAAAAALYLMSIAS

SEQ ID NO: 6066 - protein, 16 aa, Artificial Sequence
  Cyclic GFR-binding peptide
AAAAAAAAFFLISLSS

SEQ ID NO: 6067 - protein, 15 aa, Artificial Sequence
  Cyclic GFR-binding peptide
GGGGGGGFYLVSIAN

SEQ ID NO: 6068 - protein, 16 aa, Artificial Sequence
  Cyclic GFR-binding peptide
GGGGGGGGYYLVSTAS

SEQ ID NO: 6069 - protein, 15 aa, Artificial Sequence
  Cyclic GFR-binding peptide
AAAAAAAKYLVSIPS

SEQ ID NO: 6070 - protein, 16 aa, Artificial Sequence
  Cyclic GFR-binding peptide
AAAAAAAALYLISIPE

SEQ ID NO: 6071 - protein, 15 aa, Artificial Sequence
  Cyclic GFR-binding peptide
GGGGGGGFYLMNIPS

SEQ ID NO: 6072 - protein, 16 aa, Artificial Sequence
  Cyclic GFR-binding peptide
GGGGGGGGIYLISIPS

SEQ ID NO: 6073 - protein, 15 aa, Artificial Sequence
  Cyclic GFR-binding peptide
AAAAAAAIFLISIPS

SEQ ID NO: 6074 - protein, 16 aa, Artificial Sequence
  Cyclic GFR-binding peptide
AAAAAAAAVYLMSLPK

SEQ ID NO: 6075 - protein, 15 aa, Artificial Sequence
  Cyclic GFR-binding peptide
GGGGGGGYYVIPLPE

SEQ ID NO: 6076 - protein, 16 aa, Artificial Sequence
  Cyclic GFR-binding peptide
GGGGGGGGYYLITLPE

SEQ ID NO: 6077 - protein, 15 aa, Artificial Sequence
  Cyclic GFR-binding peptide
AAAAAAAMIQMTINS

SEQ ID NO: 6078 - protein, 16 aa, Artificial Sequence
  Cyclic GFR-binding peptide
AAAAAAAAVKAVKVSR

SEQ ID NO: 6079 - protein, 15 aa, Artificial Sequence
  Cyclic GFR-binding peptide
GGGGGGGIKRVQVPR

SEQ ID NO: 6080 - protein, 27 aa, Artificial Sequence
  Cyclic GFR-binding peptide
GGGGKENEDLYLMSIASMKTPVHPKIR

SEQ ID NO: 6081 - protein, 29 aa, Artificial Sequence
  Cyclic GFR-binding peptide
GGGGGGNKNEDLYLMSIASLKTPVKRVYE

SEQ ID NO: 6082 - protein, 27 aa, Artificial Sequence
  Cyclic GFR-binding peptide
AAAAKDYEDLYLMSIASLQTPVKRVIE

SEQ ID NO: 6083 - protein, 29 aa, Artificial Sequence
  Cyclic GFR-binding peptide
AAAAAANSSDDLYLMSIASLRTPVKENED

SEQ ID NO: 6084 - protein, 27 aa, Artificial Sequence
  Cyclic GFR-binding peptide
GGGGNSSDDLYLMSIASTKTPVNKNED

SEQ ID NO: 6085 - protein, 29 aa, Artificial Sequence
  Cyclic GFR-binding peptide
GGGGGGNSSDDLYLMSIASLATPVKDYED

SEQ ID NO: 6086 - protein, 27 aa, Artificial Sequence
  Cyclic GFR-binding peptide
AAAANNSSDLYLMSIASLDTPVNSSDD

SEQ ID NO: 6087 - protein, 29 aa, Artificial Sequence
  Cyclic GFR-binding peptide
AAAAAAVGMDDLYLMSIASMKEPVNSSDD

SEQ ID NO: 6088 - protein, 27 aa, Artificial Sequence
  Cyclic GFR-binding peptide
GGGGVVGKDLYLMSIASLKTPANSSDD

SEQ ID NO: 6089 - protein, 29 aa, Artificial Sequence
  Cyclic GFR-binding peptide
GGGGGGQQKDNLYLMSIASLQTPANNSSD

SEQ ID NO: 6090 - protein, 27 aa, Artificial Sequence
  Cyclic GFR-binding peptide
AAAANNAADLYLMSIASMKTPTVGMDD

SEQ ID NO: 6091 - protein, 29 aa, Artificial Sequence
  Cyclic GFR-binding peptide
AAAAAANNASDLYLMSIASLRAPVVVGKD

SEQ ID NO: 6092 - protein, 27 aa, Artificial Sequence
  Cyclic GFR-binding peptide
GGGGNSSDDLYLMSIASTKVPAQQKDN

SEQ ID NO: 6093 - protein, 29 aa, Artificial Sequence
  Cyclic GFR-binding peptide
GGGGGGVRGNDLYLMSIASLAQPVNNAAD

SEQ ID NO: 6094 - protein, 27 aa, Artificial Sequence
  Cyclic GFR-binding peptide
AAAAPKRGVLYLMSIASLDQSVNNASD

SEQ ID NO: 6095 - protein, 29 aa, Artificial Sequence
  Cyclic GFR-binding peptide
AAAAAAPTKGILYLMSIASLDQPVNSSDD

SEQ ID NO: 6096 - protein, 27 aa, Artificial Sequence
  Cyclic GFR-binding peptide
GGGGPTRGVLYLMSIASHHVRSVRGND

SEQ ID NO: 6097 - protein, 29 aa, Artificial Sequence
  Cyclic GFR-binding peptide
GGGGGGHPKIRLYLMSIASLQVQTPKRGV

SEQ ID NO: 6098 - protein, 27 aa, Artificial Sequence
  Cyclic GFR-binding peptide
AAAAHPKIRFFLISLSSLEEPVPTKGI

SEQ ID NO: 6099 - protein, 29 aa, Artificial Sequence
  Cyclic GFR-binding peptide
AAAAAAHPKIRFFLISLSSLKEPVPTRGV

SEQ ID NO: 6100 - protein, 27 aa, Artificial Sequence
  Cyclic GFR-binding peptide
GGGGHPKIRFFLISLSSLQEPVHPKIR

SEQ ID NO: 6101 - protein, 29 aa, Artificial Sequence
  Cyclic GFR-binding peptide
GGGGGGKRVYEFFLISLSSMKEPVHPKIR

SEQ ID NO: 6102 - protein, 27 aa, Artificial Sequence
  Cyclic GFR-binding peptide
AAAAKRVIEFFLISLSSLREPVHPKIR

SEQ ID NO: 6103 - protein, 27 aa, Artificial Sequence
  Cyclic GFR-binding peptide
GGGGKENEDFFLISLSSTKEPVKENED

SEQ ID NO: 6104 - protein, 29 aa, Artificial Sequence
  Cyclic GFR-binding peptide
GGGGGGNKNEDFFLISLSSLAEPVNKNED

SEQ ID NO: 6105 - protein, 27 aa, Artificial Sequence
  Cyclic GFR-binding peptide
AAAAKDYEDFFLISLSSLDEPVKDYED

SEQ ID NO: 6106 - protein, 29 aa, Artificial Sequence
  Cyclic GFR-binding peptide
AAAAAANSSDDFFLISLSSLETPVNSSDD

SEQ ID NO: 6107 - protein, 27 aa, Artificial Sequence
  Cyclic GFR-binding peptide
GGGGNSSDDFFLISLSSLKTPANSSDD

SEQ ID NO: 6108 - protein, 29 aa, Artificial Sequence
  Cyclic GFR-binding peptide
GGGGGGNSSDDFFLISLSSLQTPANSSDD

SEQ ID NO: 6109 - protein, 27 aa, Artificial Sequence
  Cyclic GFR-binding peptide
AAAANNSSDFFLISLSSLKTPVNNSSD

SEQ ID NO: 6110 - protein, 29 aa, Artificial Sequence
  Cyclic GFR-binding peptide
AAAAAAVGMDDFFLISLSSMKTPTVGMDD

SEQ ID NO: 6111 - protein, 27 aa, Artificial Sequence
  Cyclic GFR-binding peptide
GGGGVVGKDFFLISLSSLRAPVVVGKD

SEQ ID NO: 6112 - protein, 29 aa, Artificial Sequence
  Cyclic GFR-binding peptide
GGGGGGQQKDNFFLISLSSLRTPVQQKDN

SEQ ID NO: 6113 - protein, 27 aa, Artificial Sequence
  Cyclic GFR-binding peptide
AAAANNAADFFLISLSSTKVPANNAAD

SEQ ID NO: 6114 - protein, 29 aa, Artificial Sequence
  Cyclic GFR-binding peptide
AAAAAANNASDFFLISLSSLAQPVNNASD

SEQ ID NO: 6115 - protein, 27 aa, Artificial Sequence
  Cyclic GFR-binding peptide
GGGGNSSDDFFLISLSSLDQSVNSSDD

SEQ ID NO: 6116 - protein, 29 aa, Artificial Sequence
  Cyclic GFR-binding peptide
GGGGGGVRGNDFFLISLSSLDQPVVRGND

SEQ ID NO: 6117 - protein, 27 aa, Artificial Sequence
  Cyclic GFR-binding peptide
AAAAPKRGVFFLISLSSEETPVPKRGV

SEQ ID NO: 6118 - protein, 29 aa, Artificial Sequence
  Cyclic GFR-binding peptide
AAAAAAPTKGIFFLISLSSQGTPVPTKGI

SEQ ID NO: 6119 - protein, 27 aa, Artificial Sequence
  Cyclic GFR-binding peptide
GGGGPTRGVFFLISLSSHHVRSPTRGV

SEQ ID NO: 6120 - protein, 29 aa, Artificial Sequence
  Cyclic GFR-binding peptide
GGGGGGHPKIRFFLISLSSLQVQTHPKIR

SEQ ID NO: 6121 - protein, 27 aa, Artificial Sequence
  Cyclic GFR-binding peptide
AAAAHPKIRFYLVSIANLETPAHPKIR

SEQ ID NO: 6122 - protein, 29 aa, Artificial Sequence
  Cyclic GFR-binding peptide
AAAAAAHPKIRFYLVSIANMKTPAHPKIR

SEQ ID NO: 6123 - protein, 27 aa, Artificial Sequence
  Cyclic GFR-binding peptide
GGGGHPKIRFYLVSIANLKTPAHPKIR

SEQ ID NO: 6124 - protein, 29 aa, Artificial Sequence
  Cyclic GFR-binding peptide
GGGGGGKRVYEFYLVSIANLRTPAKRVYE

SEQ ID NO: 6125 - protein, 27 aa, Artificial Sequence
  Cyclic GFR-binding peptide
AAAAKRVIEFYLVSIANTKTPAKRVIE

SEQ ID NO: 6126 - protein, 27 aa, Artificial Sequence
  Cyclic GFR-binding peptide
GGGGKENEDFYLVSIANLATPAKENED

SEQ ID NO: 6127 - protein, 29 aa, Artificial Sequence
  Cyclic GFR-binding peptide
GGGGGGNKNEDFYLVSIANLDTPANKNED

SEQ ID NO: 6128 - protein, 27 aa, Artificial Sequence
  Cyclic GFR-binding peptide
AAAAKDYEDFYLVSIANLETPVKDYED

SEQ ID NO: 6129 - protein, 29 aa, Artificial Sequence
  Cyclic GFR-binding peptide
AAAAAANSSDDFYLVSIANMKEPVNSSDD

SEQ ID NO: 6130 - protein, 27 aa, Artificial Sequence
  Cyclic GFR-binding peptide
GGGGNSSDDFYLVSIANLKTPVNSSDD

SEQ ID NO: 6131 - protein, 29 aa, Artificial Sequence
  Cyclic GFR-binding peptide
GGGGGGNSSDDFYLVSIANMKTPTNSSDD

SEQ ID NO: 6132 - protein, 27 aa, Artificial Sequence
  Cyclic GFR-binding peptide
AAAANNSSDFYLVSIANLRAPVNNSSD

SEQ ID NO: 6133 - protein, 29 aa, Artificial Sequence
  Cyclic GFR-binding peptide
AAAAAAVGMDDFYLVSIANLRTPVVGMDD

SEQ ID NO: 6134 - protein, 27 aa, Artificial Sequence
  Cyclic GFR-binding peptide
GGGGVVGKDFYLVSIANTKVPAVVGKD

SEQ ID NO: 6135 - protein, 29 aa, Artificial Sequence
  Cyclic GFR-binding peptide
GGGGGGQQKDNFYLVSIANLAQPVQQKDN

SEQ ID NO: 6136 - protein, 27 aa, Artificial Sequence
  Cyclic GFR-binding peptide
AAAANNAADFYLVSIANLDQSVNNAAD

SEQ ID NO: 6137 - protein, 29 aa, Artificial Sequence
  Cyclic GFR-binding peptide
AAAAAANNASDFYLVSIANLDQPVNNASD

SEQ ID NO: 6138 - protein, 27 aa, Artificial Sequence
  Cyclic GFR-binding peptide
GGGGNSSDDFYLVSIANEETPVNSSDD

SEQ ID NO: 6139 - protein, 29 aa, Artificial Sequence
  Cyclic GFR-binding peptide
GGGGGGVRGNDFYLVSIANQGTPVVRGND

SEQ ID NO: 6140 - protein, 27 aa, Artificial Sequence
  Cyclic GFR-binding peptide
AAAAPKRGVFYLVSIANHHVRSPKRGV

SEQ ID NO: 6141 - protein, 29 aa, Artificial Sequence
  Cyclic GFR-binding peptide
AAAAAAPTKGIFYLVSIANLQVQTPTKGI

SEQ ID NO: 6142 - protein, 27 aa, Artificial Sequence
  Cyclic GFR-binding peptide
GGGGPTRGVYYLVSTASLETPAPTRGV

SEQ ID NO: 6143 - protein, 29 aa, Artificial Sequence
  Cyclic GFR-binding peptide
GGGGGGHPKIRYYLVSTASMKTPAHPKIR

SEQ ID NO: 6144 - protein, 27 aa, Artificial Sequence
  Cyclic GFR-binding peptide
AAAAHPKIRYYLVSTASLKTPAHPKIR

SEQ ID NO: 6145 - protein, 29 aa, Artificial Sequence
  Cyclic GFR-binding peptide
AAAAAAHPKIRYYLVSTASLQTPAHPKIR

SEQ ID NO: 6146 - protein, 27 aa, Artificial Sequence
  Cyclic GFR-binding peptide
GGGGHPKIRYYLVSTASLRTPAHPKIR

SEQ ID NO: 6147 - protein, 29 aa, Artificial Sequence
  Cyclic GFR-binding peptide
GGGGGGKRVYEYYLVSTASTKTPAKRVYE

SEQ ID NO: 6148 - protein, 27 aa, Artificial Sequence
  Cyclic GFR-binding peptide
AAAAKRVIEYYLVSTASLATPAKRVIE

SEQ ID NO: 6149 - protein, 27 aa, Artificial Sequence
  Cyclic GFR-binding peptide
GGGGKENEDYYLVSTASLDTPAKENED

SEQ ID NO: 6150 - protein, 29 aa, Artificial Sequence
  Cyclic GFR-binding peptide
GGGGGGNKNEDYYLVSTASLETPVNKNED

SEQ ID NO: 6151 - protein, 27 aa, Artificial Sequence
  Cyclic GFR-binding peptide
AAAAKDYEDYYLVSTASMKEPVKDYED

SEQ ID NO: 6152 - protein, 29 aa, Artificial Sequence
  Cyclic GFR-binding peptide
AAAAAANSSDDYYLVSTASLKTPVNSSDD

SEQ ID NO: 6153 - protein, 27 aa, Artificial Sequence
  Cyclic GFR-binding peptide
GGGGNSSDDYYLVSTASMKTPTNSSDD

SEQ ID NO: 6154 - protein, 29 aa, Artificial Sequence
  Cyclic GFR-binding peptide
GGGGGGNSSDDYYLVSTASLRAPVNSSDD

SEQ ID NO: 6155 - protein, 27 aa, Artificial Sequence
  Cyclic GFR-binding peptide
AAAANNSSDYYLVSTASLRTPVNNSSD

SEQ ID NO: 6156 - protein, 29 aa, Artificial Sequence
  Cyclic GFR-binding peptide
AAAAAAVGMDDYYLVSTASTKVPAVGMDD

SEQ ID NO: 6157 - protein, 27 aa, Artificial Sequence
  Cyclic GFR-binding peptide
GGGGVVGKDYYLVSTASLAQPVVVGKD

SEQ ID NO: 6158 - protein, 29 aa, Artificial Sequence
  Cyclic GFR-binding peptide
GGGGGGQQKDNYYLVSTASLDQSVQQKDN

SEQ ID NO: 6159 - protein, 27 aa, Artificial Sequence
  Cyclic GFR-binding peptide
AAAANNAADYYLVSTASLDQPVNNAAD

SEQ ID NO: 6160 - protein, 29 aa, Artificial Sequence
  Cyclic GFR-binding peptide
AAAAAANNASDYYLVSTASEETPVNNASD

SEQ ID NO: 6161 - protein, 27 aa, Artificial Sequence
  Cyclic GFR-binding peptide
GGGGNSSDDYYLVSTASQGTPVNSSDD

SEQ ID NO: 6162 - protein, 29 aa, Artificial Sequence
  Cyclic GFR-binding peptide
GGGGGGVRGNDYYLVSTASHHVRSVRGND

SEQ ID NO: 6163 - protein, 27 aa, Artificial Sequence
  Cyclic GFR-binding peptide
AAAAPKRGVYYLVSTASLQVQTPKRGV

SEQ ID NO: 6164 - protein, 29 aa, Artificial Sequence
  Cyclic GFR-binding peptide
AAAAAAPTKGIKYLVSIPSLETPVPTKGI

SEQ ID NO: 6165 - protein, 27 aa, Artificial Sequence
  Cyclic GFR-binding peptide
GGGGPTRGVKYLVSIPSMKTPVPTRGV

SEQ ID NO: 6166 - protein, 29 aa, Artificial Sequence
  Cyclic GFR-binding peptide
GGGGGGHPKIRKYLVSIPSLKTPVHPKIR

SEQ ID NO: 6167 - protein, 27 aa, Artificial Sequence
  Cyclic GFR-binding peptide
AAAAHPKIRKYLVSIPSLQTPVHPKIR

SEQ ID NO: 6168 - protein, 29 aa, Artificial Sequence
  Cyclic GFR-binding peptide
AAAAAAHPKIRKYLVSIPSLRTPVHPKIR

SEQ ID NO: 6169 - protein, 27 aa, Artificial Sequence
  Cyclic GFR-binding peptide
GGGGHPKIRKYLVSIPSTKTPVHPKIR

SEQ ID NO: 6170 - protein, 29 aa, Artificial Sequence
  Cyclic GFR-binding peptide
GGGGGGKRVYEKYLVSIPSLATPVKRVYE

SEQ ID NO: 6171 - protein, 27 aa, Artificial Sequence
  Cyclic GFR-binding peptide
AAAAKRVIEKYLVSIPSLDTPVKRVIE

SEQ ID NO: 6172 - protein, 27 aa, Artificial Sequence
  Cyclic GFR-binding peptide
GGGGKENEDKYLVSIPSMKEPVKENED

SEQ ID NO: 6173 - protein, 29 aa, Artificial Sequence
  Cyclic GFR-binding peptide
GGGGGGNKNEDKYLVSIPSLKTPANKNED

SEQ ID NO: 6174 - protein, 27 aa, Artificial Sequence
  Cyclic GFR-binding peptide
AAAAKDYEDKYLVSIPSLQTPAKDYED

SEQ ID NO: 6175 - protein, 29 aa, Artificial Sequence
  Cyclic GFR-binding peptide
AAAAAANSSDDKYLVSIPSMKTPTNSSDD

SEQ ID NO: 6176 - protein, 27 aa, Artificial Sequence
  Cyclic GFR-binding peptide
GGGGNSSDDKYLVSIPSLRAPVNSSDD

SEQ ID NO: 6177 - protein, 29 aa, Artificial Sequence
  Cyclic GFR-binding peptide
GGGGGGNSSDDKYLVSIPSTKVPANSSDD

SEQ ID NO: 6178 - protein, 27 aa, Artificial Sequence
  Cyclic GFR-binding peptide
AAAANNSSDKYLVSIPSLAQPVNNSSD

SEQ ID NO: 6179 - protein, 29 aa, Artificial Sequence
  Cyclic GFR-binding peptide
AAAAAAVGMDDKYLVSIPSLDQSVVGMDD

SEQ ID NO: 6180 - protein, 27 aa, Artificial Sequence
  Cyclic GFR-binding peptide
GGGGVVGKDKYLVSIPSLDQPVVVGKD

SEQ ID NO: 6181 - protein, 29 aa, Artificial Sequence
  Cyclic GFR-binding peptide
GGGGGGQQKDNKYLVSIPSHHVRSQQKDN

SEQ ID NO: 6182 - protein, 27 aa, Artificial Sequence
  Cyclic GFR-binding peptide
AAAANNAADKYLVSIPSLQVQTNNAAD

SEQ ID NO: 6183 - protein, 29 aa, Artificial Sequence
  Cyclic GFR-binding peptide
AAAAAANNASDLYLISIPELETPVNNASD

SEQ ID NO: 6184 - protein, 27 aa, Artificial Sequence
  Cyclic GFR-binding peptide
GGGGNSSDDLYLISIPEMKTPVNSSDD

SEQ ID NO: 6185 - protein, 29 aa, Artificial Sequence
  Cyclic GFR-binding peptide
GGGGGGVRGNDLYLISIPELKTPVVRGND

SEQ ID NO: 6186 - protein, 27 aa, Artificial Sequence
  Cyclic GFR-binding peptide
AAAAPKRGVLYLISIPELQTPVPKRGV

SEQ ID NO: 6187 - protein, 29 aa, Artificial Sequence
  Cyclic GFR-binding peptide
AAAAAAPTKGILYLISIPELRTPVPTKGI

SEQ ID NO: 6188 - protein, 27 aa, Artificial Sequence
  Cyclic GFR-binding peptide
GGGGPTRGVLYLISIPETKTPVPTRGV

SEQ ID NO: 6189 - protein, 29 aa, Artificial Sequence
  Cyclic GFR-binding peptide
GGGGGGHPKIRLYLISIPELATPVHPKIR

SEQ ID NO: 6190 - protein, 27 aa, Artificial Sequence
  Cyclic GFR-binding peptide
AAAAHPKIRLYLISIPELDTPVHPKIR

SEQ ID NO: 6191 - protein, 29 aa, Artificial Sequence
  Cyclic GFR-binding peptide
AAAAAAHPKIRLYLISIPEMKEPVHPKIR

SEQ ID NO: 6192 - protein, 27 aa, Artificial Sequence
  Cyclic GFR-binding peptide
GGGGHPKIRLYLISIPELKTPAHPKIR

SEQ ID NO: 6193 - protein, 29 aa, Artificial Sequence
  Cyclic GFR-binding peptide
GGGGGGKRVYELYLISIPELQTPAKRVYE

SEQ ID NO: 6194 - protein, 27 aa, Artificial Sequence
  Cyclic GFR-binding peptide
AAAAKRVIELYLISIPEMKTPTKRVIE

SEQ ID NO: 6195 - protein, 27 aa, Artificial Sequence
  Cyclic GFR-binding peptide
GGGGKENEDLYLISIPELRAPVKENED

SEQ ID NO: 6196 - protein, 29 aa, Artificial Sequence
  Cyclic GFR-binding peptide
GGGGGGNKNEDLYLISIPETKVPANKNED

SEQ ID NO: 6197 - protein, 27 aa, Artificial Sequence
  Cyclic GFR-binding peptide
AAAAKDYEDLYLISIPELAQPVKDYED

SEQ ID NO: 6198 - protein, 29 aa, Artificial Sequence
  Cyclic GFR-binding peptide
AAAAAANSSDDLYLISIPELDQSVNSSDD

SEQ ID NO: 6199 - protein, 27 aa, Artificial Sequence
  Cyclic GFR-binding peptide
GGGGNSSDDLYLISIPELDQPVNSSDD

SEQ ID NO: 6200 - protein, 29 aa, Artificial Sequence
  Cyclic GFR-binding peptide
GGGGGGNSSDDLYLISIPEHHVRSNSSDD

SEQ ID NO: 6201 - protein, 27 aa, Artificial Sequence
  Cyclic GFR-binding peptide
AAAANNSSDLYLISIPELQVQTNNSSD

SEQ ID NO: 6202 - protein, 29 aa, Artificial Sequence
  Cyclic GFR-binding peptide
AAAAAAVGMDDFYLMNIPSLETPTVGMDD

SEQ ID NO: 6203 - protein, 27 aa, Artificial Sequence
  Cyclic GFR-binding peptide
GGGGVVGKDFYLMNIPSMKTPTVVGKD

SEQ ID NO: 6204 - protein, 29 aa, Artificial Sequence
  Cyclic GFR-binding peptide
GGGGGGQQKDNFYLMNIPSLKTPTQQKDN

SEQ ID NO: 6205 - protein, 27 aa, Artificial Sequence
  Cyclic GFR-binding peptide
AAAANNAADFYLMNIPSLQTPTNNAAD

SEQ ID NO: 6206 - protein, 29 aa, Artificial Sequence
  Cyclic GFR-binding peptide
AAAAAANNASDFYLMNIPSLRTPTNNASD

SEQ ID NO: 6207 - protein, 27 aa, Artificial Sequence
  Cyclic GFR-binding peptide
GGGGNSSDDFYLMNIPSTKTPTNSSDD

SEQ ID NO: 6208 - protein, 29 aa, Artificial Sequence
  Cyclic GFR-binding peptide
GGGGGGVRGNDFYLMNIPSLATPTVRGND

SEQ ID NO: 6209 - protein, 27 aa, Artificial Sequence
  Cyclic GFR-binding peptide
AAAAPKRGVFYLMNIPSLDTPTPKRGV

SEQ ID NO: 6210 - protein, 29 aa, Artificial Sequence
  Cyclic GFR-binding peptide
AAAAAAPTKGIFYLMNIPSLETPVPTKGI

SEQ ID NO: 6211 - protein, 27 aa, Artificial Sequence
  Cyclic GFR-binding peptide
GGGGPTRGVFYLMNIPSMKEPVPTRGV

SEQ ID NO: 6212 - protein, 29 aa, Artificial Sequence
  Cyclic GFR-binding peptide
GGGGGGHPKIRFYLMNIPSLKTPAHPKIR

SEQ ID NO: 6213 - protein, 27 aa, Artificial Sequence
  Cyclic GFR-binding peptide
AAAAHPKIRFYLMNIPSLQTPAHPKIR

SEQ ID NO: 6214 - protein, 29 aa, Artificial Sequence
  Cyclic GFR-binding peptide
AAAAAAHPKIRFYLMNIPSLKTPVHPKIR

SEQ ID NO: 6215 - protein, 27 aa, Artificial Sequence
  Cyclic GFR-binding peptide
GGGGHPKIRFYLMNIPSLRAPVHPKIR

SEQ ID NO: 6216 - protein, 29 aa, Artificial Sequence
  Cyclic GFR-binding peptide
GGGGGGKRVYEFYLMNIPSLRTPVKRVYE

SEQ ID NO: 6217 - protein, 27 aa, Artificial Sequence
  Cyclic GFR-binding peptide
AAAAKRVIEFYLMNIPSTKVPAKRVIE

SEQ ID NO: 6218 - protein, 27 aa, Artificial Sequence
  Cyclic GFR-binding peptide
GGGGKENEDFYLMNIPSLAQPVKENED

SEQ ID NO: 6219 - protein, 29 aa, Artificial Sequence
  Cyclic GFR-binding peptide
GGGGGGNKNEDFYLMNIPSLDQSVNKNED

SEQ ID NO: 6220 - protein, 27 aa, Artificial Sequence
  Cyclic GFR-binding peptide
AAAAKDYEDFYLMNIPSLDQPVKDYED

SEQ ID NO: 6221 - protein, 29 aa, Artificial Sequence
  Cyclic GFR-binding peptide
AAAAAANSSDDFYLMNIPSEETPVNSSDD

SEQ ID NO: 6222 - protein, 27 aa, Artificial Sequence
  Cyclic GFR-binding peptide
GGGGNSSDDFYLMNIPSQGTPVNSSDD

SEQ ID NO: 6223 - protein, 29 aa, Artificial Sequence
  Cyclic GFR-binding peptide
GGGGGGNSSDDFYLMNIPSHHVRSNSSDD

SEQ ID NO: 6224 - protein, 27 aa, Artificial Sequence
  Cyclic GFR-binding peptide
AAAANNSSDFYLMNIPSLQVQTNNSSD

SEQ ID NO: 6225 - protein, 29 aa, Artificial Sequence
  Cyclic GFR-binding peptide
AAAAAAVGMDDIYLISIPSLEAPVVGMDD

SEQ ID NO: 6226 - protein, 27 aa, Artificial Sequence
  Cyclic GFR-binding peptide
GGGGVVGKDIYLISIPSMKAPVVVGKD

SEQ ID NO: 6227 - protein, 29 aa, Artificial Sequence
  Cyclic GFR-binding peptide
GGGGGGQQKDNIYLISIPSLKAPVQQKDN

SEQ ID NO: 6228 - protein, 27 aa, Artificial Sequence
  Cyclic GFR-binding peptide
AAAANNAADIYLISIPSLQAPVNNAAD

SEQ ID NO: 6229 - protein, 29 aa, Artificial Sequence
  Cyclic GFR-binding peptide
AAAAAANNASDIYLISIPSLRAPVNNASD

SEQ ID NO: 6230 - protein, 27 aa, Artificial Sequence
  Cyclic GFR-binding peptide
GGGGNSSDDIYLISIPSTKAPVNSSDD

SEQ ID NO: 6231 - protein, 29 aa, Artificial Sequence
  Cyclic GFR-binding peptide
GGGGGGVRGNDIYLISIPSLAAPVVRGND

SEQ ID NO: 6232 - protein, 27 aa, Artificial Sequence
  Cyclic GFR-binding peptide
AAAAPKRGVIYLISIPSLDAPVPKRGV

SEQ ID NO: 6233 - protein, 29 aa, Artificial Sequence
  Cyclic GFR-binding peptide
AAAAAAPTKGIIYLISIPSLETPVPTKGI

SEQ ID NO: 6234 - protein, 27 aa, Artificial Sequence
  Cyclic GFR-binding peptide
GGGGPTRGVIYLISIPSMKEPVPTRGV

SEQ ID NO: 6235 - protein, 29 aa, Artificial Sequence
  Cyclic GFR-binding peptide
GGGGGGHPKIRIYLISIPSLKTPAHPKIR

SEQ ID NO: 6236 - protein, 27 aa, Artificial Sequence
  Cyclic GFR-binding peptide
AAAAHPKIRIYLISIPSLQTPAHPKIR

SEQ ID NO: 6237 - protein, 29 aa, Artificial Sequence
  Cyclic GFR-binding peptide
AAAAAAHPKIRIYLISIPSLKTPVHPKIR

SEQ ID NO: 6238 - protein, 27 aa, Artificial Sequence
  Cyclic GFR-binding peptide
GGGGHPKIRIYLISIPSMKTPTHPKIR

SEQ ID NO: 6239 - protein, 29 aa, Artificial Sequence
  Cyclic GFR-binding peptide
GGGGGGKRVYEIYLISIPSLRTPVKRVYE

SEQ ID NO: 6240 - protein, 27 aa, Artificial Sequence
  Cyclic GFR-binding peptide
AAAAKRVIEIYLISIPSTKVPAKRVIE

SEQ ID NO: 6241 - protein, 27 aa, Artificial Sequence
  Cyclic GFR-binding peptide
GGGGKENEDIYLISIPSLAQPVKENED

SEQ ID NO: 6242 - protein, 29 aa, Artificial Sequence
  Cyclic GFR-binding peptide
GGGGGGNKNEDIYLISIPSLDQSVNKNED

SEQ ID NO: 6243 - protein, 27 aa, Artificial Sequence
  Cyclic GFR-binding peptide
AAAAKDYEDIYLISIPSLDQPVKDYED

SEQ ID NO: 6244 - protein, 29 aa, Artificial Sequence
  Cyclic GFR-binding peptide
AAAAAANSSDDIYLISIPSEETPVNSSDD

SEQ ID NO: 6245 - protein, 27 aa, Artificial Sequence
  Cyclic GFR-binding peptide
GGGGNSSDDIYLISIPSQGTPVNSSDD

SEQ ID NO: 6246 - protein, 29 aa, Artificial Sequence
  Cyclic GFR-binding peptide
GGGGGGNSSDDIYLISIPSHHVRSNSSDD

SEQ ID NO: 6247 - protein, 27 aa, Artificial Sequence
  Cyclic GFR-binding peptide
AAAANNSSDIYLISIPSLQVQTNNSSD

SEQ ID NO: 6248 - protein, 29 aa, Artificial Sequence
  Cyclic GFR-binding peptide
AAAAAAVGMDDIFLISIPSLETPVVGMDD

SEQ ID NO: 6249 - protein, 27 aa, Artificial Sequence
  Cyclic GFR-binding peptide
GGGGVVGKDIFLISIPSMKTPVVVGKD

SEQ ID NO: 6250 - protein, 29 aa, Artificial Sequence
  Cyclic GFR-binding peptide
GGGGGGQQKDNIFLISIPSLKTPVQQKDN

SEQ ID NO: 6251 - protein, 27 aa, Artificial Sequence
  Cyclic GFR-binding peptide
AAAANNAADIFLISIPSLQTPVNNAAD

SEQ ID NO: 6252 - protein, 29 aa, Artificial Sequence
  Cyclic GFR-binding peptide
AAAAAANNASDIFLISIPSLRTPVNNASD

SEQ ID NO: 6253 - protein, 27 aa, Artificial Sequence
  Cyclic GFR-binding peptide
GGGGNSSDDIFLISIPSTKTPVNSSDD

SEQ ID NO: 6254 - protein, 29 aa, Artificial Sequence
  Cyclic GFR-binding peptide
GGGGGGVRGNDIFLISIPSLATPVVRGND

SEQ ID NO: 6255 - protein, 27 aa, Artificial Sequence
  Cyclic GFR-binding peptide
AAAAPKRGVIFLISIPSLDTPVPKRGV

SEQ ID NO: 6256 - protein, 29 aa, Artificial Sequence
  Cyclic GFR-binding peptide
AAAAAAPTKGIIFLISIPSMKEPVPTKGI

SEQ ID NO: 6257 - protein, 27 aa, Artificial Sequence
  Cyclic GFR-binding peptide
GGGGPTRGVIFLISIPSLKTPAPTRGV

SEQ ID NO: 6258 - protein, 29 aa, Artificial Sequence
  Cyclic GFR-binding peptide
GGGGGGHPKIRIFLISIPSLQTPAHPKIR

SEQ ID NO: 6259 - protein, 27 aa, Artificial Sequence
  Cyclic GFR-binding peptide
AAAAHPKIRIFLISIPSMKTPTHPKIR

SEQ ID NO: 6260 - protein, 29 aa, Artificial Sequence
  Cyclic GFR-binding peptide
AAAAAAHPKIRIFLISIPSLRAPVHPKIR

SEQ ID NO: 6261 - protein, 27 aa, Artificial Sequence
  Cyclic GFR-binding peptide
GGGGHPKIRIFLISIPSTKVPAHPKIR

SEQ ID NO: 6262 - protein, 29 aa, Artificial Sequence
  Cyclic GFR-binding peptide
GGGGGGKRVYEIFLISIPSLAQPVKRVYE

SEQ ID NO: 6263 - protein, 27 aa, Artificial Sequence
  Cyclic GFR-binding peptide
AAAAKRVIEIFLISIPSLDQSVKRVIE

SEQ ID NO: 6264 - protein, 27 aa, Artificial Sequence
  Cyclic GFR-binding peptide
GGGGKENEDIFLISIPSLDQPVKENED

SEQ ID NO: 6265 - protein, 29 aa, Artificial Sequence
  Cyclic GFR-binding peptide
GGGGGGNKNEDIFLISIPSHHVRSNKNED

SEQ ID NO: 6266 - protein, 27 aa, Artificial Sequence
  Cyclic GFR-binding peptide
AAAAKDYEDIFLISIPSLQVQTKDYED

SEQ ID NO: 6267 - protein, 29 aa, Artificial Sequence
  Cyclic GFR-binding peptide
AAAAAANSSDDVYLMSLPKLEVPANSSDD

SEQ ID NO: 6268 - protein, 27 aa, Artificial Sequence
  Cyclic GFR-binding peptide
GGGGNSSDDVYLMSLPKMKVPANSSDD

SEQ ID NO: 6269 - protein, 29 aa, Artificial Sequence
  Cyclic GFR-binding peptide
GGGGGGNSSDDVYLMSLPKLKVPANSSDD

SEQ ID NO: 6270 - protein, 27 aa, Artificial Sequence
  Cyclic GFR-binding peptide
AAAANNSSDVYLMSLPKLQVPANNSSD

SEQ ID NO: 6271 - protein, 29 aa, Artificial Sequence
  Cyclic GFR-binding peptide
AAAAAAVGMDDVYLMSLPKLRVPAVGMDD

SEQ ID NO: 6272 - protein, 27 aa, Artificial Sequence
  Cyclic GFR-binding peptide
GGGGVVGKDVYLMSLPKLAVPAVVGKD

SEQ ID NO: 6273 - protein, 29 aa, Artificial Sequence
  Cyclic GFR-binding peptide
GGGGGGQQKDNVYLMSLPKLDVPAQQKDN

SEQ ID NO: 6274 - protein, 27 aa, Artificial Sequence
  Cyclic GFR-binding peptide
AAAANNAADVYLMSLPKLETPVNNAAD

SEQ ID NO: 6275 - protein, 29 aa, Artificial Sequence
  Cyclic GFR-binding peptide
AAAAAANNASDVYLMSLPKMKEPVNNASD

SEQ ID NO: 6276 - protein, 27 aa, Artificial Sequence
  Cyclic GFR-binding peptide
GGGGNSSDDVYLMSLPKLKTPANSSDD

SEQ ID NO: 6277 - protein, 29 aa, Artificial Sequence
  Cyclic GFR-binding peptide
GGGGGGVRGNDVYLMSLPKLQTPAVRGND

SEQ ID NO: 6278 - protein, 27 aa, Artificial Sequence
  Cyclic GFR-binding peptide
AAAAPKRGVVYLMSLPKLKTPVPKRGV

SEQ ID NO: 6279 - protein, 29 aa, Artificial Sequence
  Cyclic GFR-binding peptide
AAAAAAPTKGIVYLMSLPKMKTPTPTKGI

SEQ ID NO: 6280 - protein, 27 aa, Artificial Sequence
  Cyclic GFR-binding peptide
GGGGPTRGVVYLMSLPKLRAPVKENED

SEQ ID NO: 6281 - protein, 29 aa, Artificial Sequence
  Cyclic GFR-binding peptide
GGGGGGHPKIRVYLMSLPKLRTPVNKNED

SEQ ID NO: 6282 - protein, 27 aa, Artificial Sequence
  Cyclic GFR-binding peptide
AAAAHPKIRVYLMSLPKLAQPVKDYED

SEQ ID NO: 6283 - protein, 29 aa, Artificial Sequence
  Cyclic GFR-binding peptide
AAAAAAHPKIRVYLMSLPKLDQSVNSSDD

SEQ ID NO: 6284 - protein, 27 aa, Artificial Sequence
  Cyclic GFR-binding peptide
GGGGHPKIRVYLMSLPKLDQPVNSSDD

SEQ ID NO: 6285 - protein, 29 aa, Artificial Sequence
  Cyclic GFR-binding peptide
GGGGGGKRVYEVYLMSLPKEETPVNSSDD

SEQ ID NO: 6286 - protein, 27 aa, Artificial Sequence
  Cyclic GFR-binding peptide
AAAAKRVIEVYLMSLPKQGTPVNNSSD

SEQ ID NO: 6287 - protein, 27 aa, Artificial Sequence
  Cyclic GFR-binding peptide
GGGGKENEDVYLMSLPKHHVRSVGMDD

SEQ ID NO: 6288 - protein, 29 aa, Artificial Sequence
  Cyclic GFR-binding peptide
GGGGGGNKNEDVYLMSLPKLQVQTVVGKD

SEQ ID NO: 6289 - protein, 27 aa, Artificial Sequence
  Cyclic GFR-binding peptide
AAAAKDYEDYYVIPLPELEQPVQQKDN

SEQ ID NO: 6290 - protein, 29 aa, Artificial Sequence
  Cyclic GFR-binding peptide
AAAAAANSSDDYYVIPLPEMKQPVNNAAD

SEQ ID NO: 6291 - protein, 27 aa, Artificial Sequence
  Cyclic GFR-binding peptide
GGGGNSSDDYYVIPLPELKQPVNNASD

SEQ ID NO: 6292 - protein, 29 aa, Artificial Sequence
  Cyclic GFR-binding peptide
GGGGGGNSSDDYYVIPLPELQQPVNSSDD

SEQ ID NO: 6293 - protein, 27 aa, Artificial Sequence
  Cyclic GFR-binding peptide
AAAANNSSDYYVIPLPELRQPVVRGND

SEQ ID NO: 6294 - protein, 29 aa, Artificial Sequence
  Cyclic GFR-binding peptide
AAAAAAVGMDDYYVIPLPETKQPVPKRGV

SEQ ID NO: 6295 - protein, 27 aa, Artificial Sequence
  Cyclic GFR-binding peptide
GGGGVVGKDYYVIPLPELDQPVPTKGI

SEQ ID NO: 6296 - protein, 29 aa, Artificial Sequence
  Cyclic GFR-binding peptide
GGGGGGQQKDNYYVIPLPELETPVPTRGV

SEQ ID NO: 6297 - protein, 27 aa, Artificial Sequence
  Cyclic GFR-binding peptide
AAAANNAADYYVIPLPEMKEPVHPKIR

SEQ ID NO: 6298 - protein, 29 aa, Artificial Sequence
  Cyclic GFR-binding peptide
AAAAAANNASDYYVIPLPELKTPAHPKIR

SEQ ID NO: 6299 - protein, 27 aa, Artificial Sequence
  Cyclic GFR-binding peptide
GGGGNSSDDYYVIPLPELQTPAHPKIR

SEQ ID NO: 6300 - protein, 29 aa, Artificial Sequence
  Cyclic GFR-binding peptide
GGGGGGVRGNDYYVIPLPELKTPVHPKIR

SEQ ID NO: 6301 - protein, 27 aa, Artificial Sequence
  Cyclic GFR-binding peptide
AAAAPKRGVYYVIPLPEMKTPTKRVYE

SEQ ID NO: 6302 - protein, 29 aa, Artificial Sequence
  Cyclic GFR-binding peptide
AAAAAAPTKGIYYVIPLPELRAPVKRVIE

SEQ ID NO: 6303 - protein, 27 aa, Artificial Sequence
  Cyclic GFR-binding peptide
GGGGPTRGVYYVIPLPELRTPVKENED

SEQ ID NO: 6304 - protein, 29 aa, Artificial Sequence
  Cyclic GFR-binding peptide
GGGGGGHPKIRYYVIPLPETKVPANKNED

SEQ ID NO: 6305 - protein, 27 aa, Artificial Sequence
  Cyclic GFR-binding peptide
AAAAHPKIRYYVIPLPELDQSVKDYED

SEQ ID NO: 6306 - protein, 29 aa, Artificial Sequence
  Cyclic GFR-binding peptide
AAAAAAHPKIRYYVIPLPEEETPVNSSDD

SEQ ID NO: 6307 - protein, 27 aa, Artificial Sequence
  Cyclic GFR-binding peptide
GGGGHPKIRYYVIPLPEQGTPVNSSDD

SEQ ID NO: 6308 - protein, 29 aa, Artificial Sequence
  Cyclic GFR-binding peptide
GGGGGGKRVYEYYVIPLPEHHVRSNSSDD

SEQ ID NO: 6309 - protein, 27 aa, Artificial Sequence
  Cyclic GFR-binding peptide
AAAAKRVIEYYVIPLPELQVQTNNSSD

SEQ ID NO: 6310 - protein, 27 aa, Artificial Sequence
  Cyclic GFR-binding peptide
GGGGKENEDYYLITLPELEQSVVGMDD

SEQ ID NO: 6311 - protein, 29 aa, Artificial Sequence
  Cyclic GFR-binding peptide
GGGGGGNKNEDYYLITLPEMKQSVVVGKD

SEQ ID NO: 6312 - protein, 27 aa, Artificial Sequence
  Cyclic GFR-binding peptide
AAAAKDYEDYYLITLPELKQSVQQKDN

SEQ ID NO: 6313 - protein, 29 aa, Artificial Sequence
  Cyclic GFR-binding peptide
AAAAAANSSDDYYLITLPELQQSVNNAAD

SEQ ID NO: 6314 - protein, 27 aa, Artificial Sequence
  Cyclic GFR-binding peptide
GGGGNSSDDYYLITLPELRQSVNNASD

SEQ ID NO: 6315 - protein, 29 aa, Artificial Sequence
  Cyclic GFR-binding peptide
GGGGGGNSSDDYYLITLPETKQSVNSSDD

SEQ ID NO: 6316 - protein, 27 aa, Artificial Sequence
  Cyclic GFR-binding peptide
AAAANNSSDYYLITLPELAQSVVRGND

SEQ ID NO: 6317 - protein, 29 aa, Artificial Sequence
  Cyclic GFR-binding peptide
AAAAAAVGMDDYYLITLPELDQSVPKRGV

SEQ ID NO: 6318 - protein, 27 aa, Artificial Sequence
  Cyclic GFR-binding peptide
GGGGVVGKDYYLITLPELETPVPTKGI

SEQ ID NO: 6319 - protein, 29 aa, Artificial Sequence
  Cyclic GFR-binding peptide
GGGGGGQQKDNYYLITLPEMKEPVPTRGV

SEQ ID NO: 6320 - protein, 27 aa, Artificial Sequence
  Cyclic GFR-binding peptide
AAAANNAADYYLITLPELKTPAHPKIR

SEQ ID NO: 6321 - protein, 29 aa, Artificial Sequence
  Cyclic GFR-binding peptide
AAAAAANNASDYYLITLPELQTPAHPKIR

SEQ ID NO: 6322 - protein, 27 aa, Artificial Sequence
  Cyclic GFR-binding peptide
GGGGNSSDDYYLITLPELKTPVHPKIR

SEQ ID NO: 6323 - protein, 29 aa, Artificial Sequence
  Cyclic GFR-binding peptide
GGGGGGVRGNDYYLITLPEMKTPTHPKIR

SEQ ID NO: 6324 - protein, 27 aa, Artificial Sequence
  Cyclic GFR-binding peptide
AAAAPKRGVYYLITLPELRAPVKRVYE

SEQ ID NO: 6325 - protein, 29 aa, Artificial Sequence
  Cyclic GFR-binding peptide
AAAAAAPTKGIYYLITLPELRTPVKRVIE

SEQ ID NO: 6326 - protein, 27 aa, Artificial Sequence
  Cyclic GFR-binding peptide
GGGGPTRGVYYLITLPETKVPAKENED

SEQ ID NO: 6327 - protein, 29 aa, Artificial Sequence
  Cyclic GFR-binding peptide
GGGGGGHPKIRYYLITLPELAQPVNKNED

SEQ ID NO: 6328 - protein, 27 aa, Artificial Sequence
  Cyclic GFR-binding peptide
AAAAHPKIRYYLITLPEEETPVKDYED

SEQ ID NO: 6329 - protein, 29 aa, Artificial Sequence
  Cyclic GFR-binding peptide
AAAAAAHPKIRYYLITLPEQGTPVNSSDD

SEQ ID NO: 6330 - protein, 27 aa, Artificial Sequence
  Cyclic GFR-binding peptide
GGGGHPKIRYYLITLPEHHVRSNSSDD

SEQ ID NO: 6331 - protein, 29 aa, Artificial Sequence
  Cyclic GFR-binding peptide
GGGGGGKRVYEYYLITLPELQVQTNSSDD

SEQ ID NO: 6332 - protein, 27 aa, Artificial Sequence
  Cyclic GFR-binding peptide
AAAAKRVIEYYLITLPELEQPVNNSSD

SEQ ID NO: 6333 - protein, 27 aa, Artificial Sequence
  Cyclic GFR-binding peptide
GGGGKENEDYYLITLPEMKQPVVGMDD

SEQ ID NO: 6334 - protein, 29 aa, Artificial Sequence
  Cyclic GFR-binding peptide
GGGGGGNKNEDYYLITLPELKQPVVVGKD

SEQ ID NO: 6335 - protein, 27 aa, Artificial Sequence
  Cyclic GFR-binding peptide
AAAAKDYEDYYLITLPELQQPVQQKDN

SEQ ID NO: 6336 - protein, 29 aa, Artificial Sequence
  Cyclic GFR-binding peptide
AAAAAANSSDDYYLITLPELRQPVNNAAD

SEQ ID NO: 6337 - protein, 27 aa, Artificial Sequence
  Cyclic GFR-binding peptide
GGGGNSSDDYYLITLPETKQPVNNASD

SEQ ID NO: 6338 - protein, 29 aa, Artificial Sequence
  Cyclic GFR-binding peptide
GGGGGGNSSDDYYLITLPELDQPVNSSDD

SEQ ID NO: 6339 - protein, 27 aa, Artificial Sequence
  Cyclic GFR-binding peptide
AAAANNSSDMIQMTINSQGTPVVRGND

SEQ ID NO: 6340 - protein, 29 aa, Artificial Sequence
  Cyclic GFR-binding peptide
AAAAAAVGMDDMIQMTINSMKEPVPKRGV

SEQ ID NO: 6341 - protein, 27 aa, Artificial Sequence
  Cyclic GFR-binding peptide
GGGGVVGKDMIQMTINSLKTPAPTKGI

SEQ ID NO: 6342 - protein, 29 aa, Artificial Sequence
  Cyclic GFR-binding peptide
GGGGGGQQKDNMIQMTINSLQTPAPTRGV

SEQ ID NO: 6343 - protein, 27 aa, Artificial Sequence
  Cyclic GFR-binding peptide
AAAANNAADMIQMTINSMKTPTHPKIR

SEQ ID NO: 6344 - protein, 29 aa, Artificial Sequence
  Cyclic GFR-binding peptide
AAAAAANNASDMIQMTINSLRAPVHPKIR

SEQ ID NO: 6345 - protein, 27 aa, Artificial Sequence
  Cyclic GFR-binding peptide
GGGGNSSDDMIQMTINSTKVPAHPKIR

SEQ ID NO: 6346 - protein, 29 aa, Artificial Sequence
  Cyclic GFR-binding peptide
GGGGGGVRGNDMIQMTINSLAQPVHPKIR

SEQ ID NO: 6347 - protein, 27 aa, Artificial Sequence
  Cyclic GFR-binding peptide
AAAAPKRGVMIQMTINSLDQSVKRVYE

SEQ ID NO: 6348 - protein, 29 aa, Artificial Sequence
  Cyclic GFR-binding peptide
AAAAAAPTKGIMIQMTINSLDQPVKRVIE

SEQ ID NO: 6349 - protein, 27 aa, Artificial Sequence
  Cyclic GFR-binding peptide
GGGGPTRGVMIQMTINSHHVRSKENED

SEQ ID NO: 6350 - protein, 29 aa, Artificial Sequence
  Cyclic GFR-binding peptide
GGGGGGHPKIRMIQMTINSLQVQTNKNED

SEQ ID NO: 6351 - protein, 27 aa, Artificial Sequence
  Cyclic GFR-binding peptide
AAAAHPKIRVKAVKVSRLQVRSKDYED

SEQ ID NO: 6352 - protein, 29 aa, Artificial Sequence
  Cyclic GFR-binding peptide
AAAAAAHPKIRVKAVKVSRLETPVNSSDD

SEQ ID NO: 6353 - protein, 27 aa, Artificial Sequence
  Cyclic GFR-binding peptide
GGGGHPKIRVKAVKVSRMKEPVNSSDD

SEQ ID NO: 6354 - protein, 29 aa, Artificial Sequence
  Cyclic GFR-binding peptide
GGGGGGKRVYEVKAVKVSRLKTPANSSDD

SEQ ID NO: 6355 - protein, 27 aa, Artificial Sequence
  Cyclic GFR-binding peptide
AAAAKRVIEVKAVKVSRLQTPANNSSD

SEQ ID NO: 6356 - protein, 27 aa, Artificial Sequence
  Cyclic GFR-binding peptide
GGGGKENEDVKAVKVSRLKTPVVGMDD

SEQ ID NO: 6357 - protein, 29 aa, Artificial Sequence
  Cyclic GFR-binding peptide
GGGGGGNKNEDVKAVKVSRMKTPTVVGKD

SEQ ID NO: 6358 - protein, 27 aa, Artificial Sequence
  Cyclic GFR-binding peptide
AAAAKDYEDVKAVKVSRLRAPVQQKDN

SEQ ID NO: 6359 - protein, 29 aa, Artificial Sequence
  Cyclic GFR-binding peptide
AAAAAANSSDDVKAVKVSRLRTPVNNAAD

SEQ ID NO: 6360 - protein, 27 aa, Artificial Sequence
  Cyclic GFR-binding peptide
GGGGNSSDDVKAVKVSRTKVPANNASD

SEQ ID NO: 6361 - protein, 29 aa, Artificial Sequence
  Cyclic GFR-binding peptide
GGGGGGNSSDDVKAVKVSRLAQPVNSSDD

SEQ ID NO: 6362 - protein, 27 aa, Artificial Sequence
  Cyclic GFR-binding peptide
AAAANNSSDVKAVKVSRLDQSVVRGND

SEQ ID NO: 6363 - protein, 29 aa, Artificial Sequence
  Cyclic GFR-binding peptide
AAAAAAVGMDDVKAVKVSRLDQPVPKRGV

SEQ ID NO: 6364 - protein, 27 aa, Artificial Sequence
  Cyclic GFR-binding peptide
GGGGVVGKDVKAVKVSREETPVPTKGI

SEQ ID NO: 6365 - protein, 29 aa, Artificial Sequence
  Cyclic GFR-binding peptide
GGGGGGQQKDNVKAVKVSRQGTPVPTRGV

SEQ ID NO: 6366 - protein, 27 aa, Artificial Sequence
  Cyclic GFR-binding peptide
AAAANNAADVKAVKVSRLQVQTHPKIR

SEQ ID NO: 6367 - protein, 29 aa, Artificial Sequence
  Cyclic GFR-binding peptide
AAAAAANNASDIKRVQVPRHHVQTHPKIR

SEQ ID NO: 6368 - protein, 27 aa, Artificial Sequence
  Cyclic GFR-binding peptide
GGGGNSSDDIKRVQVPRLETPVHPKIR

SEQ ID NO: 6369 - protein, 29 aa, Artificial Sequence
  Cyclic GFR-binding peptide
GGGGGGVRGNDIKRVQVPRMKEPVHPKIR

SEQ ID NO: 6370 - protein, 27 aa, Artificial Sequence
  Cyclic GFR-binding peptide
AAAAPKRGVIKRVQVPRLKTPAKRVYE

SEQ ID NO: 6371 - protein, 29 aa, Artificial Sequence
  Cyclic GFR-binding peptide
AAAAAAPTKGIIKRVQVPRLQTPAKRVIE

SEQ ID NO: 6372 - protein, 27 aa, Artificial Sequence
  Cyclic GFR-binding peptide
GGGGPTRGVIKRVQVPRLKTPVKENED

SEQ ID NO: 6373 - protein, 29 aa, Artificial Sequence
  Cyclic GFR-binding peptide
GGGGGGHPKIRIKRVQVPRMKTPTNKNED

SEQ ID NO: 6374 - protein, 27 aa, Artificial Sequence
  Cyclic GFR-binding peptide
AAAAHPKIRIKRVQVPRLRAPVKDYED

SEQ ID NO: 6375 - protein, 29 aa, Artificial Sequence
  Cyclic GFR-binding peptide
AAAAAAHPKIRIKRVQVPRLRTPVNSSDD

SEQ ID NO: 6376 - protein, 27 aa, Artificial Sequence
  Cyclic GFR-binding peptide
GGGGHPKIRIKRVQVPRTKVPANSSDD

SEQ ID NO: 6377 - protein, 29 aa, Artificial Sequence
  Cyclic GFR-binding peptide
GGGGGGKRVYEIKRVQVPRLAQPVNSSDD

SEQ ID NO: 6378 - protein, 27 aa, Artificial Sequence
  Cyclic GFR-binding peptide
AAAAKRVIEIKRVQVPRLDQSVNNSSD

SEQ ID NO: 6379 - protein, 27 aa, Artificial Sequence
  Cyclic GFR-binding peptide
GGGGKENEDIKRVQVPRLDQPVVGMDD

SEQ ID NO: 6380 - protein, 29 aa, Artificial Sequence
  Cyclic GFR-binding peptide
GGGGGGNKNEDIKRVQVPREETPVVVGKD

SEQ ID NO: 6381 - protein, 27 aa, Artificial Sequence
  Cyclic GFR-binding peptide
AAAAKDYEDIKRVQVPRQGTPVQQKDN

SEQ ID NO: 6382 - protein, 29 aa, Artificial Sequence
  Cyclic GFR-binding peptide
AAAAAANSSDDIKRVQVPRHHVRSNNAAD

SEQ ID NO: 6383 - protein, 22 aa, Artificial Sequence
  Cyclic GFR-binding peptide
  MOD_RES (16), (17): Xaa is C or S
EDKYLMSIPSLETPVXXAKPIS

SEQ ID NO: 6384 - protein, 15 aa, Artificial Sequence
  Cyclic GFR-binding peptide
IKPTKGIFYLISIAN

SEQ ID NO: 6385 - protein, 13 aa, Artificial Sequence
  Cyclic GFR-binding peptide
LYLVSIASLQTPA

SEQ ID NO: 6386 - protein, 26 aa, Artificial Sequence
  Cyclic GFR-binding peptide
  MOD_RES (22), (22): Xaa is C or S
KKRVIEKYLVSIPSLQVQTPRXQVNR

SEQ ID NO: 6387 - protein, 21 aa, Artificial Sequence
  Cyclic GFR-binding peptide
FIPKKRVIEFYLVSIANLQVQ

SEQ ID NO: 6388 - protein, 15 aa, Artificial Sequence
  Cyclic GFR-binding peptide
IVNSSDDKYLVSIPS

SEQ ID NO: 6389 - protein, 17 aa, Artificial Sequence
  Cyclic GFR-binding peptide
IVNSSDDLYLVSIASLK

SEQ ID NO: 6390 - protein, 19 aa, Artificial Sequence
  Cyclic GFR-binding peptide
  MOD_RES (14), (15): Xaa is C or S
LYLISIASLDQSVXXPSAS

SEQ ID NO: 6391 - protein, 18 aa, Artificial Sequence
  Cyclic GFR-binding peptide
FIPKKRVIEFYLVSIANL

SEQ ID NO: 6392 - protein, 24 aa, Artificial Sequence
  Cyclic GFR-binding peptide
  MOD_RES (18), (19): Xaa is C or S
SSDDYYLVSTASLQTPAXXPKPVT

SEQ ID NO: 6393 - protein, 21 aa, Artificial Sequence
  Cyclic GFR-binding peptide
  MOD_RES (15), (15): Xaa is C or S
DKYLVSIPSLKTPAXTPKTVH

SEQ ID NO: 6394 - protein, 21 aa, Artificial Sequence
  Cyclic GFR-binding peptide
  MOD_RES (15), (16): Xaa is C or S
DFYLMSIANLETPVXXAKPIS

SEQ ID NO: 6395 - protein, 17 aa, Artificial Sequence
  Cyclic GFR-binding peptide
VKPTRGVKYLISIPSLD

SEQ ID NO: 6396 - protein, 23 aa, Artificial Sequence
  Cyclic GFR-binding peptide
  MOD_RES (17), (18): Xaa is C or S
YEDKYLMSIPSLETPVXXAKPIS

SEQ ID NO: 6397 - protein, 13 aa, Artificial Sequence
  Cyclic GFR-binding peptide
LYLISIASLAQPV

SEQ ID NO: 6398 - protein, 22 aa, Artificial Sequence
  Cyclic GFR-binding peptide
  MOD_RES (16), (17): Xaa is C or S
DDYYLVSTASLQTPAXXPKPVT

SEQ ID NO: 6399 - protein, 16 aa, Artificial Sequence
  Cyclic GFR-binding peptide
  MOD_RES (14), (15): Xaa is C or S
YYLVSTASLQTPAXXP

SEQ ID NO: 6400 - protein, 15 aa, Artificial Sequence
  Cyclic GFR-binding peptide
IKPTKGILYLISIAS

SEQ ID NO: 6401 - protein, 26 aa, Artificial Sequence
  Cyclic GFR-binding peptide
  MOD_RES (20), (21): Xaa is C or S
KPTRGVFYLISIANLDQPVXXPSASA

SEQ ID NO: 6402 - protein, 16 aa, Artificial Sequence
  Cyclic GFR-binding peptide
  MOD_RES (14), (15): Xaa is C or S
YYLISTASLAQPVXXP

SEQ ID NO: 6403 - protein, 23 aa, Artificial Sequence
  Cyclic GFR-binding peptide
  MOD_RES (17), (18): Xaa is C or S
RGVLYLISIASLAQPVXXPAASA

SEQ ID NO: 6404 - protein, 24 aa, Artificial Sequence
  Cyclic GFR-binding peptide
  MOD_RES (18), (19): Xaa is C or S
TRGVLYLISIASLDQPVXXPSASA

SEQ ID NO: 6405 - protein, 26 aa, Artificial Sequence
  Cyclic GFR-binding peptide
  MOD_RES (20), (21): Xaa is C or S
KPKRGVLYLISIASLAQPVXXPAASA

SEQ ID NO: 6406 - protein, 22 aa, Artificial Sequence
  Cyclic GFR-binding peptide
  MOD_RES (16), (17): Xaa is C or S
SDKYLVSIPSLKTPAXXAKPVA

SEQ ID NO: 6407 - protein, 18 aa, Artificial Sequence
  Cyclic GFR-binding peptide
  MOD_RES (14), (15): Xaa is C or S
YYLISTASLDQPVXXPSA

SEQ ID NO: 6408 - protein, 18 aa, Artificial Sequence
  Cyclic GFR-binding peptide
  MOD_RES (14), (15): Xaa is C or S
YYLISTASLAQPVXXPAA

SEQ ID NO: 6409 - protein, 18 aa, Artificial Sequence
  Cyclic GFR-binding peptide
  MOD_RES (14), (15): Xaa is C or S
FYLVSIANLKTPAXXAKP

SEQ ID NO: 6410 - protein, 26 aa, Artificial Sequence
  Cyclic GFR-binding peptide
  MOD_RES (20), (21): Xaa is C or S
VNNSSDKYLVSIPSLKTPAXXAKPVA

SEQ ID NO: 6411 - protein, 18 aa, Artificial Sequence
  Cyclic GFR-binding peptide
VVKENEDYYLMSTASLET

SEQ ID NO: 6412 - protein, 24 aa, Artificial Sequence
  Cyclic GFR-binding peptide
  MOD_RES (18), (19): Xaa is C or S
ENEDKYLMSIPSLETPVXXAKPIK

SEQ ID NO: 6413 - protein, 25 aa, Artificial Sequence
  Cyclic GFR-binding peptide
  MOD_RES (19), (20): Xaa is C or S
PTRGVFYLISIANLDQPVXXPSASA

SEQ ID NO: 6414 - protein, 17 aa, Artificial Sequence
  Cyclic GFR-binding peptide
  MOD_RES (16), (16): Xaa is C or S
KYLVSIPSLQVQTPRXQ

SEQ ID NO: 6415 - protein, 21 aa, Artificial Sequence
  Cyclic GFR-binding peptide
FIPKKRVIELYLVSIASLQVQ

SEQ ID NO: 6416 - protein, 18 aa, Artificial Sequence
  Cyclic GFR-binding peptide
  MOD_RES (16), (16): Xaa is C or S
LYLVSIASLQVQTPRXQV

SEQ ID NO: 6417 - protein, 17 aa, Artificial Sequence
  Cyclic GFR-binding peptide
IVNSSDDLYLVSIASLQ

SEQ ID NO: 6418 - protein, 21 aa, Artificial Sequence
  Cyclic GFR-binding peptide
  MOD_RES (15), (16): Xaa is C or S
DLYLVSIASLKTPAXXAKPVA

SEQ ID NO: 6419 - protein, 24 aa, Artificial Sequence
  Cyclic GFR-binding peptide
  MOD_RES (18), (19): Xaa is C or S
KRGVYYLISTASLAQPVXXPAASA

SEQ ID NO: 6420 - protein, 25 aa, Artificial Sequence
  Cyclic GFR-binding peptide
  MOD_RES (19), (20): Xaa is C or S
PTKGIYYLISTASLDQSVXXPSASA

SEQ ID NO: 6421 - protein, 22 aa, Artificial Sequence
  Cyclic GFR-binding peptide
  MOD_RES (16), (17): Xaa is C or S
GIKYLISIPSLDQSVXXPSASA

SEQ ID NO: 6422 - protein, 25 aa, Artificial Sequence
  Cyclic GFR-binding peptide
  MOD_RES (19), (20): Xaa is C or S
NNSSDLYLVSIASLKTPAXXAKPVA

SEQ ID NO: 6423 - protein, 17 aa, Artificial Sequence
  Cyclic GFR-binding peptide
  MOD_RES (16), (16): Xaa is C or S
LYLVSIASLQVQTPRXQ

SEQ ID NO: 6424 - protein, 15 aa, Artificial Sequence
  Cyclic GFR-binding peptide
VKPKRGVFYLISIAN

SEQ ID NO: 6425 - protein, 23 aa, Artificial Sequence
  Cyclic GFR-binding peptide
  MOD_RES (17), (18): Xaa is C or S
RGVYYLISTASLDQPVXXPSASA

SEQ ID NO: 6426 - protein, 16 aa, Artificial Sequence
  Cyclic GFR-binding peptide
IVNSSDDLYLVSIASL

SEQ ID NO: 6427 - protein, 23 aa, Artificial Sequence
  Cyclic GFR-binding peptide
  MOD_RES (19), (19): Xaa is C or S
VIELYLVSIASLQVQTPRXQVNR

SEQ ID NO: 6428 - protein, 13 aa, Artificial Sequence
  Cyclic GFR-binding peptide
LYLISIASLDQSV

SEQ ID NO: 6429 - protein, 21 aa, Artificial Sequence
  Cyclic GFR-binding peptide
  MOD_RES (15), (16): Xaa is C or S
DFYLMSIANLETPVXXAKPIK

SEQ ID NO: 6430 - protein, 29 aa, Artificial Sequence
  Cyclic GFR-binding peptide
  MOD_RES (25), (25): Xaa is C or S
FIPKKRVIELYLVSIASLQVQTPRXQVNR

SEQ ID NO: 6431 - protein, 16 aa, Artificial Sequence
  Cyclic GFR-binding peptide
IKPTKGIYYLISTASL

SEQ ID NO: 6432 - protein, 20 aa, Artificial Sequence
  Cyclic GFR-binding peptide
  MOD_RES (14), (15): Xaa is C or S
FYLVSIANLKTPAXXAKPVA

SEQ ID NO: 6433 - protein, 22 aa, Artificial Sequence
  Cyclic GFR-binding peptide
  MOD_RES (16), (17): Xaa is C or S
DDLYLVSIASLQTPAXXPKPVT

SEQ ID NO: 6434 - protein, 15 aa, Artificial Sequence
  Cyclic GFR-binding peptide
  MOD_RES (14), (15): Xaa is C or S
LYLISIASLAQPVXX

SEQ ID NO: 6435 - protein, 15 aa, Artificial Sequence
  Cyclic GFR-binding peptide
VKPKRGVYYLISTAS

SEQ ID NO: 6436 - protein, 24 aa, Artificial Sequence
  Cyclic GFR-binding peptide
  MOD_RES (18), (19): Xaa is C or S
GMDDLYLVSIASLKTPVXXAKGVK

SEQ ID NO: 6437 - protein, 27 aa, Artificial Sequence
  Cyclic GFR-binding peptide
  MOD_RES (21), (22): Xaa is C or S
VKPKRGVLYLISIASLAQPVXXPAASA

SEQ ID NO: 6438 - protein, 15 aa, Artificial Sequence
  Cyclic GFR-binding peptide
IKPTKGIYYLISTAS

SEQ ID NO: 6439 - protein, 22 aa, Artificial Sequence
  Cyclic GFR-binding peptide
  MOD_RES (18), (18): Xaa is C or S
IELYLVSIASLQVQTPRXQVNR

SEQ ID NO: 6440 - protein, 15 aa, Artificial Sequence
  Cyclic GFR-binding peptide
  MOD_RES (14), (14): Xaa is C or S
YYLVSTASLKTPAXT

SEQ ID NO: 6441 - protein, 22 aa, Artificial Sequence
  Cyclic GFR-binding peptide
  MOD_RES (16), (16): Xaa is C or S
DDKYLVSIPSLKTPAXTPKTVH

SEQ ID NO: 6442 - protein, 25 aa, Artificial Sequence
  Cyclic GFR-binding peptide
  MOD_RES (19), (20): Xaa is C or S
VGMDDLYLVSIASLKTPVXXAKGVK

SEQ ID NO: 6443 - protein, 29 aa, Artificial Sequence
  Cyclic GFR-binding peptide
  MOD_RES (25), (25): Xaa is C or S
FIPKKRVIEFYLVSIANLQVQTPRXQVNR

SEQ ID NO: 6444 - protein, 27 aa, Artificial Sequence
  Cyclic GFR-binding peptide
  MOD_RES (21), (22): Xaa is C or S
VVKDYEDKYLMSIPSLETPVXXAKPIS

SEQ ID NO: 6445 - protein, 27 aa, Artificial Sequence
  Cyclic GFR-binding peptide
  MOD_RES (21), (22): Xaa is C or S
IVNNSSDFYLVSIANLKTPAXXAKPVA

SEQ ID NO: 6446 - protein, 20 aa, Artificial Sequence
  Cyclic GFR-binding peptide
  MOD_RES (14), (15): Xaa is C or S
YYLMSTASLETPVXXAKPIS

SEQ ID NO: 6447 - protein, 17 aa, Artificial Sequence
  Cyclic GFR-binding peptide
VKPTRGVFYLISIANLD

SEQ ID NO: 6448 - protein, 17 aa, Artificial Sequence
  Cyclic GFR-binding peptide
  MOD_RES (14), (15): Xaa is C or S
FYLMSIANLETPVXXAK

SEQ ID NO: 6449 - protein, 17 aa, Artificial Sequence
  Cyclic GFR-binding peptide
IVNSSDDKYLVSIPSLQ

SEQ ID NO: 6450 - protein, 20 aa, Artificial Sequence
  Cyclic GFR-binding peptide
  MOD_RES (14), (15): Xaa is C or S
LYLVSIASLQTPAXXPKPVT

SEQ ID NO: 6451 - protein, 19 aa, Artificial Sequence
  Cyclic GFR-binding peptide
  MOD_RES (14), (15): Xaa is C or S
LYLVSIASLQTPAXXPKPV

SEQ ID NO: 6452 - protein, 17 aa, Artificial Sequence
  Cyclic GFR-binding peptide
IVNSSDDKYLVSIPSLK

SEQ ID NO: 6453 - protein, 17 aa, Artificial Sequence
  Cyclic GFR-binding peptide
  MOD_RES (14), (15): Xaa is C or S
KYLMSIPSLETPVXXAK

SEQ ID NO: 6454 - protein, 14 aa, Artificial Sequence
  Cyclic GFR-binding peptide
  MOD_RES (14), (14): Xaa is C or S
LYLISIASLAQPVX

SEQ ID NO: 6455 - protein, 20 aa, Artificial Sequence
  Cyclic GFR-binding peptide
  MOD_RES (14), (15): Xaa is C or S
KYLVSIPSLQTPAXXPKPVT

SEQ ID NO: 6456 - protein, 27 aa, Artificial Sequence
  Cyclic GFR-binding peptide
  MOD_RES (21), (22): Xaa is C or S
IVNNSSDLYLVSIASLKTPAXXAKPVA

SEQ ID NO: 6457 - protein, 21 aa, Artificial Sequence
  Cyclic GFR-binding peptide
  MOD_RES (15), (16): Xaa is C or S
VYYLISTASLDQPVXXPSASA

SEQ ID NO: 6458 - protein, 25 aa, Artificial Sequence
  Cyclic GFR-binding peptide
  MOD_RES (19), (20): Xaa is C or S
KENEDKYLMSIPSLETPVXXAKPIK

SEQ ID NO: 6459 - protein, 27 aa, Artificial Sequence
  Cyclic GFR-binding peptide
  MOD_RES (21), (22): Xaa is C or S
IVNSSDDYYLVSTASLQTPAXXPKPVT

SEQ ID NO: 6460 - protein, 16 aa, Artificial Sequence
  Cyclic GFR-binding peptide
  MOD_RES (16), (16): Xaa is C or S
LYLVSIASLQVQTPRX

SEQ ID NO: 6461 - protein, 19 aa, Artificial Sequence
  Cyclic GFR-binding peptide
  MOD_RES (14), (15): Xaa is C or S
LYLVSIASLKTPAXXAKPV

SEQ ID NO: 6462 - protein, 16 aa, Artificial Sequence
  Cyclic GFR-binding peptide
VKPKRGVYYLISTASL

SEQ ID NO: 6463 - protein, 20 aa, Artificial Sequence
  Cyclic GFR-binding peptide
  MOD_RES (14), (15): Xaa is C or S
KYLVSIPSLKTPAXXAKPVA

SEQ ID NO: 6464 - protein, 27 aa, Artificial Sequence
  Cyclic GFR-binding peptide
  MOD_RES (21), (22): Xaa is C or S
VVKDYEDFYLMSIANLETPVXXAKPIS

SEQ ID NO: 6465 - protein, 20 aa, Artificial Sequence
  Cyclic GFR-binding peptide
  MOD_RES (16), (16): Xaa is C or S
FYLVSIANLQVQTPRXQVNR

SEQ ID NO: 6466 - protein, 19 aa, Artificial Sequence
  Cyclic GFR-binding peptide
VKPTRGVKYLISIPSLDQP

SEQ ID NO: 6467 - protein, 23 aa, Artificial Sequence
  Cyclic GFR-binding peptide
  MOD_RES (19), (19): Xaa is C or S
VIEFYLVSIANLQVQTPRXQVNR

SEQ ID NO: 6468 - protein, 19 aa, Artificial Sequence
  Cyclic GFR-binding peptide
  MOD_RES (14), (15): Xaa is C or S
LYLISIASLDQPVXXPSAS

SEQ ID NO: 6469 - protein, 26 aa, Artificial Sequence
  Cyclic GFR-binding peptide
  MOD_RES (20), (21): Xaa is C or S
KPKRGVYYLISTASLAQPVXXPAASA

SEQ ID NO: 6470 - protein, 28 aa, Artificial Sequence
  Cyclic GFR-binding peptide
  MOD_RES (24), (24): Xaa is C or S
IPKKRVIELYLVSIASLQVQTPRXQVNR

SEQ ID NO: 6471 - protein, 16 aa, Artificial Sequence
  Cyclic GFR-binding peptide
IKPTKGILYLISIASL

SEQ ID NO: 6472 - protein, 24 aa, Artificial Sequence
  Cyclic GFR-binding peptide
  MOD_RES (18), (19): Xaa is C or S
GMDDFYLVSIANLKTPVXXAKGVK

SEQ ID NO: 6473 - protein, 26 aa, Artificial Sequence
  Cyclic GFR-binding peptide
  MOD_RES (20), (21): Xaa is C or S
KPKRGVKYLISIPSLAQPVXXPAASA

SEQ ID NO: 6474 - protein, 25 aa, Artificial Sequence
  Cyclic GFR-binding peptide
  MOD_RES (21), (21): Xaa is C or S
KRVIEYYLVSTASLQVQTPRXQVNR

SEQ ID NO: 6475 - protein, 19 aa, Artificial Sequence
  Cyclic GFR-binding peptide
  MOD_RES (14), (15): Xaa is C or S
KYLISIPSLDQSVXXPSAS

SEQ ID NO: 6476 - protein, 17 aa, Artificial Sequence
  Cyclic GFR-binding peptide
  MOD_RES (14), (14): Xaa is C or S
LYLVSIASLKTPAXTPK

SEQ ID NO: 6477 - protein, 27 aa, Artificial Sequence
  Cyclic GFR-binding peptide
  MOD_RES (21), (22): Xaa is C or S
VVKENEDKYLMSIPSLETPVXXAKPIK

SEQ ID NO: 6478 - protein, 19 aa, Artificial Sequence
  Cyclic GFR-binding peptide
IVNSSDDKYLVSIPSLKTP

SEQ ID NO: 6479 - protein, 17 aa, Artificial Sequence
  Cyclic GFR-binding peptide
VKPKRGVKYLISIPSLA

SEQ ID NO: 6480 - protein, 20 aa, Artificial Sequence
  Cyclic GFR-binding peptide
  MOD_RES (14), (15): Xaa is C or S
FYLMSIANLETPVXXAKPIK

SEQ ID NO: 6481 - protein, 24 aa, Artificial Sequence
  Cyclic GFR-binding peptide
  MOD_RES (18), (19): Xaa is C or S
TKGIYYLISTASLDQSVXXPSASA

SEQ ID NO: 6482 - protein, 18 aa, Artificial Sequence
  Cyclic GFR-binding peptide
  MOD_RES (16), (16): Xaa is C or S
FYLVSIANLQVQTPRXQV

SEQ ID NO: 6483 - protein, 27 aa, Artificial Sequence
  Cyclic GFR-binding peptide
  MOD_RES (23), (23): Xaa is C or S
PKKRVIEFYLVSIANLQVQTPRXQVNR

SEQ ID NO: 6484 - protein, 22 aa, Artificial Sequence
  Cyclic GFR-binding peptide
  MOD_RES (16), (17): Xaa is C or S
GVKYLISIPSLAQPVXXPAASA

SEQ ID NO: 6485 - protein, 17 aa, Artificial Sequence
  Cyclic GFR-binding peptide
  MOD_RES (14), (15): Xaa is C or S
LYLVSIASLKTPAXXPK

SEQ ID NO: 6486 - protein, 21 aa, Artificial Sequence
  Cyclic GFR-binding peptide
  MOD_RES (15), (16): Xaa is C or S
DLYLVSIASLKTPAXXPKPVY

SEQ ID NO: 6487 - protein, 19 aa, Artificial Sequence
  Cyclic GFR-binding peptide
IVNSSDDKYLVSIPSLQTP

SEQ ID NO: 6488 - protein, 18 aa, Artificial Sequence
  Cyclic GFR-binding peptide
  MOD_RES (14), (15): Xaa is C or S
LYLVSIASLKTPAXXAKP

SEQ ID NO: 6489 - protein, 22 aa, Artificial Sequence
  Cyclic GFR-binding peptide
  MOD_RES (16), (17): Xaa is C or S
EDKYLMSIPSLETPVXXAKPIK

SEQ ID NO: 6490 - protein, 23 aa, Artificial Sequence
  Cyclic GFR-binding peptide
  MOD_RES (17), (18): Xaa is C or S
RGVYYLISTASLAQPVXXPAASA

SEQ ID NO: 6491 - protein, 27 aa, Artificial Sequence
  Cyclic GFR-binding peptide
  MOD_RES (23), (23): Xaa is C or S
PKKRVIELYLVSIASLQVQTPRXQVNR

SEQ ID NO: 6492 - protein, 27 aa, Artificial Sequence
  Cyclic GFR-binding peptide
  MOD_RES (21), (22): Xaa is C or S
VKPKRGVKYLISIPSLAQPVXXPAASA

SEQ ID NO: 6493 - protein, 15 aa, Artificial Sequence
  Cyclic GFR-binding peptide
  MOD_RES (14), (15): Xaa is C or S
FYLISIANLAQPVXX

SEQ ID NO: 6494 - protein, 21 aa, Artificial Sequence
  Cyclic GFR-binding peptide
  MOD_RES (15), (16): Xaa is C or S
DKYLMSIPSLETPVXXAKPIK

SEQ ID NO: 6495 - protein, 13 aa, Artificial Sequence
  Cyclic GFR-binding peptide
LYLISIASLDQPV

SEQ ID NO: 6496 - protein, 13 aa, Artificial Sequence
  Cyclic GFR-binding peptide
FYLISIANLAQPV

SEQ ID NO: 6497 - protein, 19 aa, Artificial Sequence
  Cyclic GFR-binding peptide
VKPTRGVLYLISIASLDQP

SEQ ID NO: 6498 - protein, 24 aa, Artificial Sequence
  Cyclic GFR-binding peptide
  MOD_RES (18), (19): Xaa is C or S
TRGVKYLISIPSLDQPVXXPSASA

SEQ ID NO: 6499 - protein, 19 aa, Artificial Sequence
  Cyclic GFR-binding peptide
VKPKRGVKYLISIPSLAQP

SEQ ID NO: 6500 - protein, 14 aa, Artificial Sequence
  Cyclic GFR-binding peptide
  MOD_RES (14), (14): Xaa is C or S
YYLMSTASLETPVX

SEQ ID NO: 6501 - protein, 26 aa, Artificial Sequence
  Cyclic GFR-binding peptide
  MOD_RES (22), (22): Xaa is C or S
KKRVIEYYLVSTASLQVQTPRXQVNR

SEQ ID NO: 6502 - protein, 17 aa, Artificial Sequence
  Cyclic GFR-binding peptide
VKPKRGVFYLISIANLA

SEQ ID NO: 6503 - protein, 25 aa, Artificial Sequence
  Cyclic GFR-binding peptide
  MOD_RES (19), (19): Xaa is C or S
NSSDDLYLVSIASLKTPAXTPKTVH

SEQ ID NO: 6504 - protein, 16 aa, Artificial Sequence
  Cyclic GFR-binding peptide
  MOD_RES (14), (15): Xaa is C or S
YYLISTASLDQPVXXP

SEQ ID NO: 6505 - protein, 25 aa, Artificial Sequence
  Cyclic GFR-binding peptide
  MOD_RES (19), (20): Xaa is C or S
PTRGVKYLISIPSLDQPVXXPSASA

SEQ ID NO: 6506 - protein, 16 aa, Artificial Sequence
  Cyclic GFR-binding peptide
VKPTRGVYYLISTASL

SEQ ID NO: 6507 - protein, 21 aa, Artificial Sequence
  Cyclic GFR-binding peptide
  MOD_RES (15), (16): Xaa is C or S
VLYLISIASLDQPVXXPSASA

SEQ ID NO: 6508 - protein, 18 aa, Artificial Sequence
  Cyclic GFR-binding peptide
TPVGMDDYYLVSTASLKT

SEQ ID NO: 6509 - protein, 18 aa, Artificial Sequence
  Cyclic GFR-binding peptide
  MOD_RES (14), (15): Xaa is C or S
YYLVSTASLKTPVXXAKG

SEQ ID NO: 6510 - protein, 27 aa, Artificial Sequence
  Cyclic GFR-binding peptide
  MOD_RES (21), (22): Xaa is C or S
IVNNSSDKYLVSIPSLKTPAXXAKPVA

SEQ ID NO: 6511 - protein, 16 aa, Artificial Sequence
  Cyclic GFR-binding peptide
  MOD_RES (14), (15): Xaa is C or S
YYLISTASLDQSVXXP

SEQ ID NO: 6512 - protein, 25 aa, Artificial Sequence
  Cyclic GFR-binding peptide
  MOD_RES (19), (20): Xaa is C or S
KENEDFYLMSIANLETPVXXAKPIK

SEQ ID NO: 6513 - protein, 20 aa, Artificial Sequence
  Cyclic GFR-binding peptide
  MOD_RES (14), (15): Xaa is C or S
KYLISIPSLDQPVXXPSASA

SEQ ID NO: 6514 - protein, 24 aa, Artificial Sequence
  Cyclic GFR-binding peptide
  MOD_RES (18), (19): Xaa is C or S
DYEDYYLMSTASLETPVXXAKPIS

SEQ ID NO: 6515 - protein, 24 aa, Artificial Sequence
  Cyclic GFR-binding peptide
  MOD_RES (18), (18): Xaa is C or S
SSDDKYLVSIPSLKTPAXTPKTVH

SEQ ID NO: 6516 - protein, 19 aa, Artificial Sequence
  Cyclic GFR-binding peptide
  MOD_RES (14), (15): Xaa is C or S
FYLVSIANLKTPVXXAKGV

SEQ ID NO: 6517 - protein, 26 aa, Artificial Sequence
  Cyclic GFR-binding peptide
  MOD_RES (22), (22): Xaa is C or S
KKRVIEFYLVSIANLQVQTPRXQVNR

SEQ ID NO: 6518 - protein, 26 aa, Artificial Sequence
  Cyclic GFR-binding peptide
  MOD_RES (20), (21): Xaa is C or S
PVGMDDLYLVSIASLKTPVXXAKGVK

SEQ ID NO: 6519 - protein, 26 aa, Artificial Sequence
  Cyclic GFR-binding peptide
  MOD_RES (20), (21): Xaa is C or S
VNNSSDLYLVSIASLKTPAXXAKPVA

SEQ ID NO: 6520 - protein, 21 aa, Artificial Sequence
  Cyclic GFR-binding peptide
  MOD_RES (15), (16): Xaa is C or S
VKYLISIPSLAQPVXXPAASA

SEQ ID NO: 6521 - protein, 18 aa, Artificial Sequence
  Cyclic GFR-binding peptide
  MOD_RES (14), (15): Xaa is C or S
LYLVSIASLQTPAXXPKP

SEQ ID NO: 6522 - protein, 15 aa, Artificial Sequence
  Cyclic GFR-binding peptide
  MOD_RES (14), (15): Xaa is C or S
LYLVSIASLQTPAXX

SEQ ID NO: 6523 - protein, 20 aa, Artificial Sequence
  Cyclic GFR-binding peptide
  MOD_RES (14), (15): Xaa is C or S
FYLISIANLAQPVXXPAASA

SEQ ID NO: 6524 - protein, 13 aa, Artificial Sequence
  Cyclic GFR-binding peptide
LYLVSIASLQVQT

SEQ ID NO: 6525 - protein, 19 aa, Artificial Sequence
  Cyclic GFR-binding peptide
  MOD_RES (14), (14): Xaa is C or S
LYLVSIASLKTPAXTPKTV

SEQ ID NO: 6526 - protein, 20 aa, Artificial Sequence
  Cyclic GFR-binding peptide
  MOD_RES (14), (15): Xaa is C or S
LYLISIASLAQPVXXPAASA

SEQ ID NO: 6527 - protein, 13 aa, Artificial Sequence
  Cyclic GFR-binding peptide
FYLVSIANLQVQT

SEQ ID NO: 6528 - protein, 25 aa, Artificial Sequence
  Cyclic GFR-binding peptide
  MOD_RES (19), (20): Xaa is C or S
NSSDDYYLVSTASLKTPAXXPKPVY

SEQ ID NO: 6529 - protein, 24 aa, Artificial Sequence
  Cyclic GFR-binding peptide
  MOD_RES (18), (19): Xaa is C or S
NSSDLYLVSIASLKTPAXXAKPVA

SEQ ID NO: 6530 - protein, 15 aa, Artificial Sequence
  Cyclic GFR-binding peptide
VKPTRGVFYLISIAN

SEQ ID NO: 6531 - protein, 15 aa, Artificial Sequence
  Cyclic GFR-binding peptide
IVNSSDDLYLVSIAS

SEQ ID NO: 6532 - protein, 21 aa, Artificial Sequence
  Cyclic GFR-binding peptide
  MOD_RES (15), (16): Xaa is C or S
DLYLVSIASLQTPAXXPKPVT

SEQ ID NO: 6533 - protein, 17 aa, Artificial Sequence
  Cyclic GFR-binding peptide
VKPTRGVLYLISIASLD

SEQ ID NO: 6534 - protein, 19 aa, Artificial Sequence
  Cyclic GFR-binding peptide
IKPTKGIYYLISTASLDQS

SEQ ID NO: 6535 - protein, 27 aa, Artificial Sequence
  Cyclic GFR-binding peptide
  MOD_RES (21), (22): Xaa is C or S
VKPKRGVFYLISIANLAQPVXXPAASA

SEQ ID NO: 6536 - protein, 25 aa, Artificial Sequence
  Cyclic GFR-binding peptide
  MOD_RES (19), (20): Xaa is C or S
NSSDDLYLVSIASLQTPAXXPKPVT

SEQ ID NO: 6537 - protein, 27 aa, Artificial Sequence
  Cyclic GFR-binding peptide
  MOD_RES (23), (23): Xaa is C or S
PKKRVIEKYLVSIPSLQVQTPRXQVNR

SEQ ID NO: 6538 - protein, 26 aa, Artificial Sequence
  Cyclic GFR-binding peptide
  MOD_RES (20), (21): Xaa is C or S
KPTKGIYYLISTASLDQSVXXPSASA

SEQ ID NO: 6539 - protein, 18 aa, Artificial Sequence
  Cyclic GFR-binding peptide
  MOD_RES (14), (14): Xaa is C or S
LYLVSIASLKTPAXTPKT

SEQ ID NO: 6540 - protein, 20 aa, Artificial Sequence
  Cyclic GFR-binding peptide
  MOD_RES (16), (16): Xaa is C or S
LYLVSIASLQVQTPRXQVNR

SEQ ID NO: 6541 - protein, 23 aa, Artificial Sequence
  Cyclic GFR-binding peptide
  MOD_RES (17), (18): Xaa is C or S
SSDKYLVSIPSLKTPAXXAKPVA

SEQ ID NO: 6542 - protein, 15 aa, Artificial Sequence
  Cyclic GFR-binding peptide
LYLVSIASLQVQTPR

SEQ ID NO: 6543 - protein, 21 aa, Artificial Sequence
  Cyclic GFR-binding peptide
  MOD_RES (15), (16): Xaa is C or S
VFYLISIANLAQPVXXPAASA

SEQ ID NO: 6544 - protein, 26 aa, Artificial Sequence
  Cyclic GFR-binding peptide
  MOD_RES (20), (21): Xaa is C or S
KPTKGIFYLISIANLDQSVXXPSASA

SEQ ID NO: 6545 - protein, 17 aa, Artificial Sequence
  Cyclic GFR-binding peptide
  MOD_RES (14), (15): Xaa is C or S
LYLVSIASLQTPAXXPK

SEQ ID NO: 6546 - protein, 23 aa, Artificial Sequence
  Cyclic GFR-binding peptide
  MOD_RES (17), (17): Xaa is C or S
SDDKYLVSIPSLKTPAXTPKTVH

SEQ ID NO: 6547 - protein, 17 aa, Artificial Sequence
  Cyclic GFR-binding peptide
  MOD_RES (14), (15): Xaa is C or S
YYLVSTASLKTPVXXAK

SEQ ID NO: 6548 - protein, 26 aa, Artificial Sequence
  Cyclic GFR-binding peptide
  MOD_RES (20), (21): Xaa is C or S
VNSSDDLYLVSIASLKTPAXXPKPVY

SEQ ID NO: 6549 - protein, 22 aa, Artificial Sequence
  Cyclic GFR-binding peptide
  MOD_RES (16), (17): Xaa is C or S
DDKYLVSIPSLKTPAXXPKPVY

SEQ ID NO: 6550 - protein, 19 aa, Artificial Sequence
  Cyclic GFR-binding peptide
VVKENEDFYLMSIANLETP

SEQ ID NO: 6551 - protein, 27 aa, Artificial Sequence
  Cyclic GFR-binding peptide
  MOD_RES (21), (22): Xaa is C or S
VVKENEDFYLMSIANLETPVXXAKPIK

SEQ ID NO: 6552 - protein, 15 aa, Artificial Sequence
  Cyclic GFR-binding peptide
  MOD_RES (14), (15): Xaa is C or S
KYLVSIPSLKTPAXX

SEQ ID NO: 6553 - protein, 23 aa, Artificial Sequence
  Cyclic GFR-binding peptide
  MOD_RES (17), (18): Xaa is C or S
KGIKYLISIPSLDQSVXXPSASA

SEQ ID NO: 6554 - protein, 19 aa, Artificial Sequence
  Cyclic GFR-binding peptide
FIPKKRVIEYYLVSTASLQ

SEQ ID NO: 6555 - protein, 24 aa, Artificial Sequence
  Cyclic GFR-binding peptide
  MOD_RES (18), (19): Xaa is C or S
SSDDLYLVSIASLQTPAXXPKPVT

SEQ ID NO: 6556 - protein, 25 aa, Artificial Sequence
  Cyclic GFR-binding peptide
  MOD_RES (19), (20): Xaa is C or S
KDYEDFYLMSIANLETPVXXAKPIS

SEQ ID NO: 6557 - protein, 16 aa, Artificial Sequence
  Cyclic GFR-binding peptide
  MOD_RES (14), (15): Xaa is C or S
KYLVSIPSLKTPAXXP

SEQ ID NO: 6558 - protein, 23 aa, Artificial Sequence
  Cyclic GFR-binding peptide
  MOD_RES (17), (18): Xaa is C or S
RGVFYLISIANLDQPVXXPSASA

SEQ ID NO: 6559 - protein, 19 aa, Artificial Sequence
  Cyclic GFR-binding peptide
  MOD_RES (14), (15): Xaa is C or S
KYLISIPSLAQPVXXPAAS

SEQ ID NO: 6560 - protein, 26 aa, Artificial Sequence
  Cyclic GFR-binding peptide
  MOD_RES (20), (20): Xaa is C or S
VNSSDDLYLVSIASLKTPAXTPKTVH

SEQ ID NO: 6561 - protein, 23 aa, Artificial Sequence
  Cyclic GFR-binding peptide
  MOD_RES (17), (18): Xaa is C or S
NEDFYLMSIANLETPVXXAKPIK

SEQ ID NO: 6562 - protein, 19 aa, Artificial Sequence
  Cyclic GFR-binding peptide
  MOD_RES (14), (15): Xaa is C or S
FYLISIANLAQPVXXPAAS

SEQ ID NO: 6563 - protein, 13 aa, Artificial Sequence
  Cyclic GFR-binding peptide
KYLISIPSLDQPV

SEQ ID NO: 6564 - protein, 19 aa, Artificial Sequence
  Cyclic GFR-binding peptide
  MOD_RES (16), (16): Xaa is C or S
YYLVSTASLQVQTPRXQVN

SEQ ID NO: 6565 - protein, 25 aa, Artificial Sequence
  Cyclic GFR-binding peptide
  MOD_RES (19), (20): Xaa is C or S
KDYEDYYLMSTASLETPVXXAKPIS

SEQ ID NO: 6566 - protein, 14 aa, Artificial Sequence
  Cyclic GFR-binding peptide
  MOD_RES (14), (14): Xaa is C or S
KYLVSIPSLQTPAX

SEQ ID NO: 6567 - protein, 15 aa, Artificial Sequence
  Cyclic GFR-binding peptide
VKPTRGVKYLISIPS

SEQ ID NO: 6568 - protein, 19 aa, Artificial Sequence
  Cyclic GFR-binding peptide
VKPKRGVLYLISIASLAQP

SEQ ID NO: 6569 - protein, 24 aa, Artificial Sequence
  Cyclic GFR-binding peptide
  MOD_RES (18), (19): Xaa is C or S
ENEDYYLMSTASLETPVXXAKPIK

SEQ ID NO: 6570 - protein, 23 aa, Artificial Sequence
  Cyclic GFR-binding peptide
  MOD_RES (17), (18): Xaa is C or S
SDDLYLVSIASLQTPAXXPKPVT

SEQ ID NO: 6571 - protein, 22 aa, Artificial Sequence
  Cyclic GFR-binding peptide
  MOD_RES (16), (17): Xaa is C or S
DDKYLVSIPSLQTPAXXPKPVT

SEQ ID NO: 6572 - protein, 16 aa, Artificial Sequence
  Cyclic GFR-binding peptide
VVKDYEDFYLMSIANL

SEQ ID NO: 6573 - protein, 18 aa, Artificial Sequence
  Cyclic GFR-binding peptide
VVKENEDKYLMSIPSLET

SEQ ID NO: 6574 - protein, 15 aa, Artificial Sequence
  Cyclic GFR-binding peptide
YYLVSTASLQVQTPR

SEQ ID NO: 6575 - protein, 14 aa, Artificial Sequence
  Cyclic GFR-binding peptide
YYLVSTASLQVQTP

SEQ ID NO: 6576 - protein, 19 aa, Artificial Sequence
  Cyclic GFR-binding peptide
VKPTRGVYYLISTASLDQP

SEQ ID NO: 6577 - protein, 17 aa, Artificial Sequence
  Cyclic GFR-binding peptide
  MOD_RES (14), (15): Xaa is C or S
YYLMSTASLETPVXXAK

SEQ ID NO: 6578 - protein, 17 aa, Artificial Sequence
  Cyclic GFR-binding peptide
FIPKKRVIELYLVSIAS

SEQ ID NO: 6579 - protein, 16 aa, Artificial Sequence
  Cyclic GFR-binding peptide
  MOD_RES (16), (16): Xaa is C or S
KYLVSIPSLQVQTPRX

SEQ ID NO: 6580 - protein, 27 aa, Artificial Sequence
  Cyclic GFR-binding peptide
  MOD_RES (21), (21): Xaa is C or S
IVNSSDDKYLVSIPSLKTPAXTPKTVH

SEQ ID NO: 6581 - protein, 28 aa, Artificial Sequence
  Cyclic GFR-binding peptide
  MOD_RES (24), (24): Xaa is C or S
IPKKRVIEYYLVSTASLQVQTPRXQVNR

SEQ ID NO: 6582 - protein, 25 aa, Artificial Sequence
  Cyclic GFR-binding peptide
  MOD_RES (19), (20): Xaa is C or S
NSSDDKYLVSIPSLKTPAXXPKPVY

SEQ ID NO: 6583 - protein, 21 aa, Artificial Sequence
  Cyclic GFR-binding peptide
  MOD_RES (17), (17): Xaa is C or S
EYYLVSTASLQVQTPRXQVNR

SEQ ID NO: 6584 - protein, 18 aa, Artificial Sequence
  Cyclic GFR-binding peptide
VKPTRGVKYLISIPSLDQ

SEQ ID NO: 6585 - protein, 23 aa, Artificial Sequence
  Cyclic GFR-binding peptide
  MOD_RES (17), (18): Xaa is C or S
SDDLYLVSIASLKTPAXXPKPVY

SEQ ID NO: 6586 - protein, 18 aa, Artificial Sequence
  Cyclic GFR-binding peptide
IVNSSDDLYLVSIASLKT

SEQ ID NO: 6587 - protein, 14 aa, Artificial Sequence
  Cyclic GFR-binding peptide
  MOD_RES (14), (14): Xaa is C or S
LYLVSIASLKTPAX

SEQ ID NO: 6588 - protein, 19 aa, Artificial Sequence
  Cyclic GFR-binding peptide
  MOD_RES (14), (15): Xaa is C or S
LYLVSIASLKTPAXXPKPV

SEQ ID NO: 6589 - protein, 19 aa, Artificial Sequence
  Cyclic GFR-binding peptide
  MOD_RES (14), (15): Xaa is C or S
FYLMSIANLETPVXXAKPI

SEQ ID NO: 6590 - protein, 17 aa, Artificial Sequence
  Cyclic GFR-binding peptide
  MOD_RES (14), (15): Xaa is C or S
LYLISIASLDQPVXXPS

SEQ ID NO: 6591 - protein, 27 aa, Artificial Sequence
  Cyclic GFR-binding peptide
  MOD_RES (23), (23): Xaa is C or S
PKKRVIEYYLVSTASLQVQTPRXQVNR

SEQ ID NO: 6592 - protein, 14 aa, Artificial Sequence
  Cyclic GFR-binding peptide
  MOD_RES (14), (14): Xaa is C or S
YYLVSTASLKTPVX

SEQ ID NO: 6593 - protein, 20 aa, Artificial Sequence
  Cyclic GFR-binding peptide
  MOD_RES (14), (15): Xaa is C or S
KYLMSIPSLETPVXXAKPIS

SEQ ID NO: 6594 - protein, 26 aa, Artificial Sequence
  Cyclic GFR-binding peptide
  MOD_RES (20), (21): Xaa is C or S
VKDYEDYYLMSTASLETPVXXAKPIS

SEQ ID NO: 6595 - protein, 20 aa, Artificial Sequence
  Cyclic GFR-binding peptide
  MOD_RES (14), (15): Xaa is C or S
FYLMSIANLETPVXXAKPIS

SEQ ID NO: 6596 - protein, 18 aa, Artificial Sequence
  Cyclic GFR-binding peptide
IVNSSDDLYLVSIASLQT

SEQ ID NO: 6597 - protein, 19 aa, Artificial Sequence
  Cyclic GFR-binding peptide
TPVGMDDLYLVSIASLKTP

SEQ ID NO: 6598 - protein, 15 aa, Artificial Sequence
  Cyclic GFR-binding peptide
  MOD_RES (14), (15): Xaa is C or S
LYLISIASLDQPVXX

SEQ ID NO: 6599 - protein, 19 aa, Artificial Sequence
  Cyclic GFR-binding peptide
  MOD_RES (14), (15): Xaa is C or S
KYLISIPSLDQPVXXPSAS

SEQ ID NO: 6600 - protein, 17 aa, Artificial Sequence
  Cyclic GFR-binding peptide
  MOD_RES (14), (15): Xaa is C or S
LYLVSIASLKTPVXXAK

SEQ ID NO: 6601 - protein, 19 aa, Artificial Sequence
  Cyclic GFR-binding peptide
IKPTKGIKYLISIPSLDQS

SEQ ID NO: 6602 - protein, 18 aa, Artificial Sequence
  Cyclic GFR-binding peptide
VKPTRGVFYLISIANLDQ

SEQ ID NO: 6603 - protein, 20 aa, Artificial Sequence
  Cyclic GFR-binding peptide
  MOD_RES (14), (15): Xaa is C or S
KYLVSIPSLKTPAXXPKPVY

SEQ ID NO: 6604 - protein, 16 aa, Artificial Sequence
  Cyclic GFR-binding peptide
IVNNSSDFYLVSIANL

SEQ ID NO: 6605 - protein, 26 aa, Artificial Sequence
  Cyclic GFR-binding peptide
  MOD_RES (22), (22): Xaa is C or S
KKRVIELYLVSIASLQVQTPRXQVNR

SEQ ID NO: 6606 - protein, 22 aa, Artificial Sequence
  Cyclic GFR-binding peptide
  MOD_RES (16), (17): Xaa is C or S
GVLYLISIASLDQPVXXPSASA

SEQ ID NO: 6607 - protein, 16 aa, Artificial Sequence
  Cyclic GFR-binding peptide
  MOD_RES (14), (15): Xaa is C or S
FYLVSIANLKTPAXXA

SEQ ID NO: 6608 - protein, 16 aa, Artificial Sequence
  Cyclic GFR-binding peptide
  MOD_RES (14), (14): Xaa is C or S
YYLVSTASLKTPAXTP

SEQ ID NO: 6609 - protein, 19 aa, Artificial Sequence
  Cyclic GFR-binding peptide
FIPKKRVIEKYLVSIPSLQ

SEQ ID NO: 6610 - protein, 19 aa, Artificial Sequence
  Cyclic GFR-binding peptide
VKPTRGVFYLISIANLDQP

SEQ ID NO: 6611 - protein, 15 aa, Artificial Sequence
  Cyclic GFR-binding peptide
  MOD_RES (14), (15): Xaa is C or S
LYLVSIASLKTPVXX

SEQ ID NO: 6612 - protein, 21 aa, Artificial Sequence
  Cyclic GFR-binding peptide
  MOD_RES (15), (16): Xaa is C or S
VLYLISIASLAQPVXXPAASA

SEQ ID NO: 6613 - protein, 20 aa, Artificial Sequence
  Cyclic GFR-binding peptide
FIPKKRVIEFYLVSIANLQV

SEQ ID NO: 6614 - protein, 14 aa, Artificial Sequence
  Cyclic GFR-binding peptide
  MOD_RES (14), (14): Xaa is C or S
LYLISIASLDQSVX

SEQ ID NO: 6615 - protein, 15 aa, Artificial Sequence
  Cyclic GFR-binding peptide
  MOD_RES (14), (15): Xaa is C or S
FYLVSIANLKTPVXX

SEQ ID NO: 6616 - protein, 19 aa, Artificial Sequence
  Cyclic GFR-binding peptide
  MOD_RES (14), (15): Xaa is C or S
YYLVSTASLKTPVXXAKGV

SEQ ID NO: 6617 - protein, 22 aa, Artificial Sequence
  Cyclic GFR-binding peptide
  MOD_RES (16), (17): Xaa is C or S
EDYYLMSTASLETPVXXAKPIS

SEQ ID NO: 6618 - protein, 20 aa, Artificial Sequence
  Cyclic GFR-binding peptide
  MOD_RES (14), (15): Xaa is C or S
YYLISTASLDQPVXXPSASA

SEQ ID NO: 6619 - protein, 16 aa, Artificial Sequence
  Cyclic GFR-binding peptide
  MOD_RES (14), (15): Xaa is C or S
LYLISIASLDQPVXXP

SEQ ID NO: 6620 - protein, 15 aa, Artificial Sequence
  Cyclic GFR-binding peptide
  MOD_RES (14), (15): Xaa is C or S
YYLVSTASLKTPVXX

SEQ ID NO: 6621 - protein, 21 aa, Artificial Sequence
  Cyclic GFR-binding peptide
  MOD_RES (15), (16): Xaa is C or S
DYYLVSTASLKTPAXXPKPVY

SEQ ID NO: 6622 - protein, 21 aa, Artificial Sequence
  Cyclic GFR-binding peptide
  MOD_RES (15), (16): Xaa is C or S
DKYLVSIPSLQTPAXXPKPVT

SEQ ID NO: 6623 - protein, 19 aa, Artificial Sequence
  Cyclic GFR-binding peptide
  MOD_RES (14), (15): Xaa is C or S
KYLVSIPSLQTPAXXPKPV

SEQ ID NO: 6624 - protein, 20 aa, Artificial Sequence
  Cyclic GFR-binding peptide
  MOD_RES (14), (15): Xaa is C or S
LYLISIASLDQSVXXPSASA

SEQ ID NO: 6625 - protein, 18 aa, Artificial Sequence
  Cyclic GFR-binding peptide
  MOD_RES (14), (15): Xaa is C or S
FYLISIANLAQPVXXPAA

SEQ ID NO: 6626 - protein, 17 aa, Artificial Sequence
  Cyclic GFR-binding peptide
VKPKRGVLYLISIASLA

SEQ ID NO: 6627 - protein, 16 aa, Artificial Sequence
  Cyclic GFR-binding peptide
  MOD_RES (14), (14): Xaa is C or S
KYLVSIPSLKTPAXTP

SEQ ID NO: 6628 - protein, 18 aa, Artificial Sequence
  Cyclic GFR-binding peptide
IVNSSDDKYLVSIPSLQT

SEQ ID NO: 6629 - protein, 15 aa, Artificial Sequence
  Cyclic GFR-binding peptide
  MOD_RES (14), (15): Xaa is C or S
FYLISIANLDQSVXX

SEQ ID NO: 6630 - protein, 27 aa, Artificial Sequence
  Cyclic GFR-binding peptide
  MOD_RES (21), (22): Xaa is C or S
VVKENEDYYLMSTASLETPVXXAKPIK

SEQ ID NO: 6631 - protein, 19 aa, Artificial Sequence
  Cyclic GFR-binding peptide
VVKENEDYYLMSTASLETP

SEQ ID NO: 6632 - protein, 15 aa, Artificial Sequence
  Cyclic GFR-binding peptide
VKPTRGVLYLISIAS

SEQ ID NO: 6633 - protein, 21 aa, Artificial Sequence
  Cyclic GFR-binding peptide
  MOD_RES (15), (16): Xaa is C or S
DKYLMSIPSLETPVXXAKPIS

SEQ ID NO: 6634 - protein, 19 aa, Artificial Sequence
  Cyclic GFR-binding peptide
  MOD_RES (14), (15): Xaa is C or S
KYLVSIPSLKTPAXXPKPV

SEQ ID NO: 6635 - protein, 24 aa, Artificial Sequence
  Cyclic GFR-binding peptide
  MOD_RES (18), (19): Xaa is C or S
TKGIFYLISIANLDQSVXXPSASA

SEQ ID NO: 6636 - protein, 25 aa, Artificial Sequence
  Cyclic GFR-binding peptide
  MOD_RES (19), (20): Xaa is C or S
KENEDYYLMSTASLETPVXXAKPIK

SEQ ID NO: 6637 - protein, 20 aa, Artificial Sequence
  Cyclic GFR-binding peptide
FIPKKRVIELYLVSIASLQV

SEQ ID NO: 6638 - protein, 13 aa, Artificial Sequence
  Cyclic GFR-binding peptide
YYLISTASLDQPV

SEQ ID NO: 6639 - protein, 27 aa, Artificial Sequence
  Cyclic GFR-binding peptide
  MOD_RES (21), (21): Xaa is C or S
IVNSSDDLYLVSIASLKTPAXTPKTVH

SEQ ID NO: 6640 - protein, 20 aa, Artificial Sequence
  Cyclic GFR-binding peptide
  MOD_RES (14), (15): Xaa is C or S
FYLISIANLDQSVXXPSASA

SEQ ID NO: 6641 - protein, 21 aa, Artificial Sequence
  Cyclic GFR-binding peptide
  MOD_RES (15), (16): Xaa is C or S
ILYLISIASLDQSVXXPSASA

SEQ ID NO: 6642 - protein, 17 aa, Artificial Sequence
  Cyclic GFR-binding peptide
VKPTRGVYYLISTASLD

SEQ ID NO: 6643 - protein, 14 aa, Artificial Sequence
  Cyclic GFR-binding peptide
  MOD_RES (14), (14): Xaa is C or S
LYLVSIASLQTPAX

SEQ ID NO: 6644 - protein, 18 aa, Artificial Sequence
  Cyclic GFR-binding peptide
  MOD_RES (14), (15): Xaa is C or S
FYLISIANLDQPVXXPSA

SEQ ID NO: 6645 - protein, 20 aa, Artificial Sequence
  Cyclic GFR-binding peptide
  MOD_RES (14), (15): Xaa is C or S
KYLISIPSLDQSVXXPSASA

SEQ ID NO: 6646 - protein, 15 aa, Artificial Sequence
  Cyclic GFR-binding peptide
  MOD_RES (14), (15): Xaa is C or S
YYLMSTASLETPVXX

SEQ ID NO: 6647 - protein, 18 aa, Artificial Sequence
  Cyclic GFR-binding peptide
IVNSSDDKYLVSIPSLKT

SEQ ID NO: 6648 - protein, 24 aa, Artificial Sequence
  Cyclic GFR-binding peptide
  MOD_RES (18), (19): Xaa is C or S
TRGVYYLISTASLDQPVXXPSASA

SEQ ID NO: 6649 - protein, 13 aa, Artificial Sequence
  Cyclic GFR-binding peptide
KYLISIPSLDQSV

SEQ ID NO: 6650 - protein, 16 aa, Artificial Sequence
  Cyclic GFR-binding peptide
  MOD_RES (14), (15): Xaa is C or S
FYLISIANLDQPVXXP

SEQ ID NO: 6651 - protein, 14 aa, Artificial Sequence
  Cyclic GFR-binding peptide
  MOD_RES (14), (14): Xaa is C or S
YYLVSTASLQTPAX

SEQ ID NO: 6652 - protein, 16 aa, Artificial Sequence
  Cyclic GFR-binding peptide
  MOD_RES (16), (16): Xaa is C or S
YYLVSTASLQVQTPRX

SEQ ID NO: 6653 - protein, 16 aa, Artificial Sequence
  Cyclic GFR-binding peptide
VVKDYEDKYLMSIPSL

SEQ ID NO: 6654 - protein, 19 aa, Artificial Sequence
  Cyclic GFR-binding peptide
IKPTKGILYLISIASLDQS

SEQ ID NO: 6655 - protein, 18 aa, Artificial Sequence
  Cyclic GFR-binding peptide
IKPTKGIKYLISIPSLDQ

SEQ ID NO: 6656 - protein, 16 aa, Artificial Sequence
  Cyclic GFR-binding peptide
  MOD_RES (14), (15): Xaa is C or S
KYLVSIPSLQTPAXXP

SEQ ID NO: 6657 - protein, 15 aa, Artificial Sequence
  Cyclic GFR-binding peptide
TPVGMDDFYLVSIAN

SEQ ID NO: 6658 - protein, 18 aa, Artificial Sequence
  Cyclic GFR-binding peptide
VVKENEDFYLMSIANLET

SEQ ID NO: 6659 - protein, 17 aa, Artificial Sequence
  Cyclic GFR-binding peptide
TPVGMDDYYLVSTASLK

SEQ ID NO: 6660 - protein, 19 aa, Artificial Sequence
  Cyclic GFR-binding peptide
IKPTKGIFYLISIANLDQS

SEQ ID NO: 6661 - protein, 20 aa, Artificial Sequence
  Cyclic GFR-binding peptide
  MOD_RES (14), (14): Xaa is C or S
YYLVSTASLKTPAXTPKTVH

SEQ ID NO: 6662 - protein, 14 aa, Artificial Sequence
  Cyclic GFR-binding peptide
KYLVSIPSLQVQTP

SEQ ID NO: 6663 - protein, 16 aa, Artificial Sequence
  Cyclic GFR-binding peptide
  MOD_RES (14), (15): Xaa is C or S
FYLISIANLAQPVXXP

SEQ ID NO: 6664 - protein, 14 aa, Artificial Sequence
  Cyclic GFR-binding peptide
  MOD_RES (14), (14): Xaa is C or S
KYLVSIPSLKTPAX

SEQ ID NO: 6665 - protein, 22 aa, Artificial Sequence
  Cyclic GFR-binding peptide
  MOD_RES (16), (17): Xaa is C or S
GIYYLISTASLDQSVXXPSASA

SEQ ID NO: 6666 - protein, 15 aa, Artificial Sequence
  Cyclic GFR-binding peptide
  MOD_RES (14), (15): Xaa is C or S
LYLISIASLDQSVXX

SEQ ID NO: 6667 - protein, 27 aa, Artificial Sequence
  Cyclic GFR-binding peptide
  MOD_RES (21), (22): Xaa is C or S
VKPTRGVYYLISTASLDQPVXXPSASA

SEQ ID NO: 6668 - protein, 15 aa, Artificial Sequence
  Cyclic GFR-binding peptide
VKPKRGVKYLISIPS

SEQ ID NO: 6669 - protein, 26 aa, Artificial Sequence
  Cyclic GFR-binding peptide
  MOD_RES (20), (21): Xaa is C or S
KPTKGILYLISIASLDQSVXXPSASA

SEQ ID NO: 6670 - protein, 22 aa, Artificial Sequence
  Cyclic GFR-binding peptide
  MOD_RES (16), (17): Xaa is C or S
GVFYLISIANLDQPVXXPSASA

SEQ ID NO: 6671 - protein, 22 aa, Artificial Sequence
  Cyclic GFR-binding peptide
  MOD_RES (16), (16): Xaa is C or S
DDYYLVSTASLKTPAXTPKTVH

SEQ ID NO: 6672 - protein, 23 aa, Artificial Sequence
  Cyclic GFR-binding peptide
  MOD_RES (17), (18): Xaa is C or S
KGIYYLISTASLDQSVXXPSASA

SEQ ID NO: 6673 - protein, 18 aa, Artificial Sequence
  Cyclic GFR-binding peptide
FIPKKRVIEYYLVSTASL

SEQ ID NO: 6674 - protein, 18 aa, Artificial Sequence
  Cyclic GFR-binding peptide
  MOD_RES (14), (15): Xaa is C or S
YYLISTASLDQSVXXPSA

SEQ ID NO: 6675 - protein, 19 aa, Artificial Sequence
  Cyclic GFR-binding peptide
IVNNSSDKYLVSIPSLKTP

SEQ ID NO: 6676 - protein, 19 aa, Artificial Sequence
  Cyclic GFR-binding peptide
VVKDYEDKYLMSIPSLETP

SEQ ID NO: 6677 - protein, 18 aa, Artificial Sequence
  Cyclic GFR-binding peptide
  MOD_RES (14), (15): Xaa is C or S
YYLMSTASLETPVXXAKP

SEQ ID NO: 6678 - protein, 17 aa, Artificial Sequence
  Cyclic GFR-binding peptide
  MOD_RES (14), (15): Xaa is C or S
KYLVSIPSLKTPAXXAK

SEQ ID NO: 6679 - protein, 21 aa, Artificial Sequence
  Cyclic GFR-binding peptide
  MOD_RES (15), (16): Xaa is C or S
DYYLVSTASLKTPVXXAKGVK

SEQ ID NO: 6680 - protein, 13 aa, Artificial Sequence
  Cyclic GFR-binding peptide
KYLISIPSLAQPV

SEQ ID NO: 6681 - protein, 13 aa, Artificial Sequence
  Cyclic GFR-binding peptide
YYLVSTASLQVQT

SEQ ID NO: 6682 - protein, 15 aa, Artificial Sequence
  Cyclic GFR-binding peptide
  MOD_RES (14), (15): Xaa is C or S
KYLVSIPSLQTPAXX

SEQ ID NO: 6683 - protein, 19 aa, Artificial Sequence
  Cyclic GFR-binding peptide
  MOD_RES (14), (15): Xaa is C or S
LYLISIASLAQPVXXPAAS

SEQ ID NO: 6684 - protein, 15 aa, Artificial Sequence
  Cyclic GFR-binding peptide
  MOD_RES (14), (15): Xaa is C or S
FYLMSIANLETPVXX

SEQ ID NO: 6685 - protein, 16 aa, Artificial Sequence
  Cyclic GFR-binding peptide
VVKENEDYYLMSTASL

SEQ ID NO: 6686 - protein, 27 aa, Artificial Sequence
  Cyclic GFR-binding peptide
  MOD_RES (21), (22): Xaa is C or S
IVNSSDDYYLVSTASLKTPAXXPKPVY

SEQ ID NO: 6687 - protein, 20 aa, Artificial Sequence
  Cyclic GFR-binding peptide
  MOD_RES (14), (15): Xaa is C or S
LYLISIASLDQPVXXPSASA

SEQ ID NO: 6688 - protein, 19 aa, Artificial Sequence
  Cyclic GFR-binding peptide
  MOD_RES (14), (14): Xaa is C or S
KYLVSIPSLKTPAXTPKTV

SEQ ID NO: 6689 - protein, 15 aa, Artificial Sequence
  Cyclic GFR-binding peptide
  MOD_RES (14), (14): Xaa is C or S
LYLVSIASLKTPAXT

SEQ ID NO: 6690 - protein, 26 aa, Artificial Sequence
  Cyclic GFR-binding peptide
  MOD_RES (20), (21): Xaa is C or S
VKENEDFYLMSIANLETPVXXAKPIK

SEQ ID NO: 6691 - protein, 18 aa, Artificial Sequence
  Cyclic GFR-binding peptide
  MOD_RES (14), (15): Xaa is C or S
KYLVSIPSLKTPAXXAKP

SEQ ID NO: 6692 - protein, 25 aa, Artificial Sequence
  Cyclic GFR-binding peptide
  MOD_RES (19), (20): Xaa is C or S
NSSDDYYLVSTASLQTPAXXPKPVT

SEQ ID NO: 6693 - protein, 15 aa, Artificial Sequence
  Cyclic GFR-binding peptide
KYLVSIPSLQVQTPR

SEQ ID NO: 6694 - protein, 23 aa, Artificial Sequence
  Cyclic GFR-binding peptide
  MOD_RES (17), (18): Xaa is C or S
YEDFYLMSIANLETPVXXAKPIS

SEQ ID NO: 6695 - protein, 19 aa, Artificial Sequence
  Cyclic GFR-binding peptide
  MOD_RES (14), (15): Xaa is C or S
YYLVSTASLKTPAXXPKPV

SEQ ID NO: 6696 - protein, 18 aa, Artificial Sequence
  Cyclic GFR-binding peptide
VKPTRGVLYLISIASLDQ

SEQ ID NO: 6697 - protein, 20 aa, Artificial Sequence
  Cyclic GFR-binding peptide
  MOD_RES (14), (15): Xaa is C or S
KYLMSIPSLETPVXXAKPIK

SEQ ID NO: 6698 - protein, 26 aa, Artificial Sequence
  Cyclic GFR-binding peptide
  MOD_RES (20), (21): Xaa is C or S
PVGMDDFYLVSIANLKTPVXXAKGVK

SEQ ID NO: 6699 - protein, 16 aa, Artificial Sequence
  Cyclic GFR-binding peptide
IVNNSSDLYLVSIASL

SEQ ID NO: 6700 - protein, 23 aa, Artificial Sequence
  Cyclic GFR-binding peptide
  MOD_RES (19), (19): Xaa is C or S
VIEKYLVSIPSLQVQTPRXQVNR

SEQ ID NO: 6701 - protein, 23 aa, Artificial Sequence
  Cyclic GFR-binding peptide
  MOD_RES (17), (18): Xaa is C or S
RGVLYLISIASLDQPVXXPSASA

SEQ ID NO: 6702 - protein, 20 aa, Artificial Sequence
  Cyclic GFR-binding peptide
  MOD_RES (14), (15): Xaa is C or S
YYLISTASLDQSVXXPSASA

SEQ ID NO: 6703 - protein, 15 aa, Artificial Sequence
  Cyclic GFR-binding peptide
VKPKRGVLYLISIAS

SEQ ID NO: 6704 - protein, 25 aa, Artificial Sequence
  Cyclic GFR-binding peptide
  MOD_RES (19), (20): Xaa is C or S
NSSDDKYLVSIPSLQTPAXXPKPVT

SEQ ID NO: 6705 - protein, 16 aa, Artificial Sequence
  Cyclic GFR-binding peptide
IVNSSDDYYLVSTASL

SEQ ID NO: 6706 - protein, 20 aa, Artificial Sequence
  Cyclic GFR-binding peptide
  MOD_RES (14), (15): Xaa is C or S
YYLMSTASLETPVXXAKPIK

SEQ ID NO: 6707 - protein, 16 aa, Artificial Sequence
  Cyclic GFR-binding peptide
  MOD_RES (14), (15): Xaa is C or S
FYLISIANLDQSVXXP

SEQ ID NO: 6708 - protein, 14 aa, Artificial Sequence
  Cyclic GFR-binding peptide
  MOD_RES (14), (14): Xaa is C or S
FYLMSIANLETPVX

SEQ ID NO: 6709 - protein, 13 aa, Artificial Sequence
  Cyclic GFR-binding peptide
KYLVSIPSLQVQT

SEQ ID NO: 6710 - protein, 17 aa, Artificial Sequence
  Cyclic GFR-binding peptide
  MOD_RES (14), (15): Xaa is C or S
LYLISIASLDQSVXXPS

SEQ ID NO: 6711 - protein, 20 aa, Artificial Sequence
  Cyclic GFR-binding peptide
  MOD_RES (14), (15): Xaa is C or S
FYLISIANLDQPVXXPSASA

SEQ ID NO: 6712 - protein, 25 aa, Artificial Sequence
  Cyclic GFR-binding peptide
  MOD_RES (19), (20): Xaa is C or S
KDYEDKYLMSIPSLETPVXXAKPIS

SEQ ID NO: 6713 - protein, 14 aa, Artificial Sequence
  Cyclic GFR-binding peptide
  MOD_RES (14), (14): Xaa is C or S
FYLVSIANLKTPVX

SEQ ID NO: 6714 - protein, 16 aa, Artificial Sequence
  Cyclic GFR-binding peptide
IVNNSSDKYLVSIPSL

SEQ ID NO: 6715 - protein, 15 aa, Artificial Sequence
  Cyclic GFR-binding peptide
  MOD_RES (14), (15): Xaa is C or S
YYLVSTASLQTPAXX

SEQ ID NO: 6716 - protein, 17 aa, Artificial Sequence
  Cyclic GFR-binding peptide
IKPTKGIYYLISTASLD

SEQ ID NO: 6717 - protein, 14 aa, Artificial Sequence
  Cyclic GFR-binding peptide
  MOD_RES (14), (14): Xaa is C or S
LYLVSIASLKTPVX

SEQ ID NO: 6718 - protein, 19 aa, Artificial Sequence
  Cyclic GFR-binding peptide
IVNSSDDYYLVSTASLQTP

SEQ ID NO: 6719 - protein, 15 aa, Artificial Sequence
  Cyclic GFR-binding peptide
IKPTKGIKYLISIPS

SEQ ID NO: 6720 - protein, 19 aa, Artificial Sequence
  Cyclic GFR-binding peptide
IVNSSDDYYLVSTASLKTP

SEQ ID NO: 6721 - protein, 18 aa, Artificial Sequence
  Cyclic GFR-binding peptide
IKPTKGIFYLISIANLDQ

SEQ ID NO: 6722 - protein, 20 aa, Artificial Sequence
  Cyclic GFR-binding peptide
  MOD_RES (14), (14): Xaa is C or S
KYLVSIPSLKTPAXTPKTVH

SEQ ID NO: 6723 - protein, 24 aa, Artificial Sequence
  Cyclic GFR-binding peptide
  MOD_RES (18), (19): Xaa is C or S
TKGILYLISIASLDQSVXXPSASA

SEQ ID NO: 6724 - protein, 19 aa, Artificial Sequence
  Cyclic GFR-binding peptide
  MOD_RES (14), (14): Xaa is C or S
YYLVSTASLKTPAXTPKTV

SEQ ID NO: 6725 - protein, 16 aa, Artificial Sequence
  Cyclic GFR-binding peptide
  MOD_RES (14), (15): Xaa is C or S
LYLISIASLDQSVXXP

SEQ ID NO: 6726 - protein, 19 aa, Artificial Sequence
  Cyclic GFR-binding peptide
IVNNSSDLYLVSIASLKTP

SEQ ID NO: 6727 - protein, 24 aa, Artificial Sequence
  Cyclic GFR-binding peptide
  MOD_RES (18), (19): Xaa is C or S
SSDDYYLVSTASLKTPAXXPKPVY

SEQ ID NO: 6728 - protein, 19 aa, Artificial Sequence
  Cyclic GFR-binding peptide
  MOD_RES (16), (16): Xaa is C or S
KYLVSIPSLQVQTPRXQVN

SEQ ID NO: 6729 - protein, 22 aa, Artificial Sequence
  Cyclic GFR-binding peptide
  MOD_RES (16), (17): Xaa is C or S
DDYYLVSTASLKTPVXXAKGVK

SEQ ID NO: 6730 - protein, 23 aa, Artificial Sequence
  Cyclic GFR-binding peptide
  MOD_RES (19), (19): Xaa is C or S
VIEYYLVSTASLQVQTPRXQVNR

SEQ ID NO: 6731 - protein, 21 aa, Artificial Sequence
  Cyclic GFR-binding peptide
  MOD_RES (15), (16): Xaa is C or S
IFYLISIANLDQSVXXPSASA

SEQ ID NO: 6732 - protein, 27 aa, Artificial Sequence
  Cyclic GFR-binding peptide
  MOD_RES (21), (22): Xaa is C or S
IKPTKGIYYLISTASLDQSVXXPSASA

SEQ ID NO: 6733 - protein, 17 aa, Artificial Sequence
  Cyclic GFR-binding peptide
  MOD_RES (14), (15): Xaa is C or S
FYLISIANLDQSVXXPS

SEQ ID NO: 6734 - protein, 19 aa, Artificial Sequence
  Cyclic GFR-binding peptide
VVKDYEDFYLMSIANLETP

SEQ ID NO: 6735 - protein, 22 aa, Artificial Sequence
  Cyclic GFR-binding peptide
  MOD_RES (16), (17): Xaa is C or S
EDFYLMSIANLETPVXXAKPIS

SEQ ID NO: 6736 - protein, 18 aa, Artificial Sequence
  Cyclic GFR-binding peptide
  MOD_RES (14), (15): Xaa is C or S
KYLMSIPSLETPVXXAKP

SEQ ID NO: 6737 - protein, 27 aa, Artificial Sequence
  Cyclic GFR-binding peptide
  MOD_RES (21), (22): Xaa is C or S
TPVGMDDFYLVSIANLKTPVXXAKGVK

SEQ ID NO: 6738 - protein, 29 aa, Artificial Sequence
  Cyclic GFR-binding peptide
  MOD_RES (25), (25): Xaa is C or S
FIPKKRVIEKYLVSIPSLQVQTPRXQVNR

SEQ ID NO: 6739 - protein, 18 aa, Artificial Sequence
  Cyclic GFR-binding peptide
  MOD_RES (14), (15): Xaa is C or S
KYLISIPSLDQSVXXPSA

SEQ ID NO: 6740 - protein, 19 aa, Artificial Sequence
  Cyclic GFR-binding peptide
  MOD_RES (14), (15): Xaa is C or S
YYLISTASLDQSVXXPSAS

SEQ ID NO: 6741 - protein, 27 aa, Artificial Sequence
  Cyclic GFR-binding peptide
  MOD_RES (21), (22): Xaa is C or S
TPVGMDDLYLVSIASLKTPVXXAKGVK

SEQ ID NO: 6742 - protein, 28 aa, Artificial Sequence
  Cyclic GFR-binding peptide
  MOD_RES (24), (24): Xaa is C or S
IPKKRVIEKYLVSIPSLQVQTPRXQVNR

SEQ ID NO: 6743 - protein, 21 aa, Artificial Sequence
  Cyclic GFR-binding peptide
  MOD_RES (15), (16): Xaa is C or S
IKYLISIPSLDQSVXXPSASA

SEQ ID NO: 6744 - protein, 18 aa, Artificial Sequence
  Cyclic GFR-binding peptide
VKPKRGVYYLISTASLAQ

SEQ ID NO: 6745 - protein, 22 aa, Artificial Sequence
  Cyclic GFR-binding peptide
  MOD_RES (16), (17): Xaa is C or S
GVLYLISIASLAQPVXXPAASA

SEQ ID NO: 6746 - protein, 16 aa, Artificial Sequence
  Cyclic GFR-binding peptide
TPVGMDDFYLVSIANL

SEQ ID NO: 6747 - protein, 25 aa, Artificial Sequence
  Cyclic GFR-binding peptide
  MOD_RES (19), (20): Xaa is C or S
NSSDDLYLVSIASLKTPAXXPKPVY

SEQ ID NO: 6748 - protein, 26 aa, Artificial Sequence
  Cyclic GFR-binding peptide
  MOD_RES (20), (21): Xaa is C or S
VNSSDDYYLVSTASLQTPAXXPKPVT

SEQ ID NO: 6749 - protein, 24 aa, Artificial Sequence
  Cyclic GFR-binding peptide
  MOD_RES (18), (19): Xaa is C or S
DYEDKYLMSIPSLETPVXXAKPIS

SEQ ID NO: 6750 - protein, 21 aa, Artificial Sequence
  Cyclic GFR-binding peptide
  MOD_RES (15), (16): Xaa is C or S
VKYLISIPSLDQPVXXPSASA

SEQ ID NO: 6751 - protein, 17 aa, Artificial Sequence
  Cyclic GFR-binding peptide
VVKENEDKYLMSIPSLE

SEQ ID NO: 6752 - protein, 13 aa, Artificial Sequence
  Cyclic GFR-binding peptide
YYLISTASLDQSV

SEQ ID NO: 6753 - protein, 22 aa, Artificial Sequence
  Cyclic GFR-binding peptide
  MOD_RES (16), (17): Xaa is C or S
SDFYLVSIANLKTPAXXAKPVA

SEQ ID NO: 6754 - protein, 22 aa, Artificial Sequence
  Cyclic GFR-binding peptide
  MOD_RES (16), (17): Xaa is C or S
DDFYLVSIANLKTPVXXAKGVK

SEQ ID NO: 6755 - protein, 20 aa, Artificial Sequence
  Cyclic GFR-binding peptide
  MOD_RES (14), (15): Xaa is C or S
YYLVSTASLQTPAXXPKPVT

SEQ ID NO: 6756 - protein, 23 aa, Artificial Sequence
  Cyclic GFR-binding peptide
  MOD_RES (17), (18): Xaa is C or S
NEDYYLMSTASLETPVXXAKPIK

SEQ ID NO: 6757 - protein, 22 aa, Artificial Sequence
  Cyclic GFR-binding peptide
  MOD_RES (16), (17): Xaa is C or S
GVYYLISTASLAQPVXXPAASA

SEQ ID NO: 6758 - protein, 20 aa, Artificial Sequence
  Cyclic GFR-binding peptide
  MOD_RES (16), (16): Xaa is C or S
YYLVSTASLQVQTPRXQVNR

SEQ ID NO: 6759 - protein, 23 aa, Artificial Sequence
  Cyclic GFR-binding peptide
  MOD_RES (17), (18): Xaa is C or S
MDDLYLVSIASLKTPVXXAKGVK

SEQ ID NO: 6760 - protein, 18 aa, Artificial Sequence
  Cyclic GFR-binding peptide
IVNNSSDFYLVSIANLKT

SEQ ID NO: 6761 - protein, 16 aa, Artificial Sequence
  Cyclic GFR-binding peptide
VVKENEDFYLMSIANL

SEQ ID NO: 6762 - protein, 16 aa, Artificial Sequence
  Cyclic GFR-binding peptide
  MOD_RES (14), (15): Xaa is C or S
LYLISIASLAQPVXXP

SEQ ID NO: 6763 - protein, 16 aa, Artificial Sequence
  Cyclic GFR-binding peptide
  MOD_RES (14), (15): Xaa is C or S
LYLVSIASLQTPAXXP

SEQ ID NO: 6764 - protein, 23 aa, Artificial Sequence
  Cyclic GFR-binding peptide
  MOD_RES (17), (18): Xaa is C or S
RGVKYLISIPSLAQPVXXPAASA

SEQ ID NO: 6765 - protein, 22 aa, Artificial Sequence
  Cyclic GFR-binding peptide
  MOD_RES (16), (16): Xaa is C or S
DDLYLVSIASLKTPAXTPKTVH

SEQ ID NO: 6766 - protein, 18 aa, Artificial Sequence
  Cyclic GFR-binding peptide
IVNNSSDLYLVSIASLKT

SEQ ID NO: 6767 - protein, 15 aa, Artificial Sequence
  Cyclic GFR-binding peptide
VVKENEDKYLMSIPS

SEQ ID NO: 6768 - protein, 25 aa, Artificial Sequence
  Cyclic GFR-binding peptide
  MOD_RES (19), (20): Xaa is C or S
PTRGVYYLISTASLDQPVXXPSASA

SEQ ID NO: 6769 - protein, 15 aa, Artificial Sequence
  Cyclic GFR-binding peptide
VVKDYEDYYLMSTAS

SEQ ID NO: 6770 - protein, 19 aa, Artificial Sequence
  Cyclic GFR-binding peptide
  MOD_RES (14), (15): Xaa is C or S
YYLVSTASLQTPAXXPKPV

SEQ ID NO: 6771 - protein, 22 aa, Artificial Sequence
  Cyclic GFR-binding peptide
  MOD_RES (16), (17): Xaa is C or S
GIFYLISIANLDQSVXXPSASA

SEQ ID NO: 6772 - protein, 14 aa, Artificial Sequence
  Cyclic GFR-binding peptide
FYLVSIANLQVQTP

SEQ ID NO: 6773 - protein, 26 aa, Artificial Sequence
  Cyclic GFR-binding peptide
  MOD_RES (20), (21): Xaa is C or S
VKDYEDFYLMSIANLETPVXXAKPIS

SEQ ID NO: 6774 - protein, 26 aa, Artificial Sequence
  Cyclic GFR-binding peptide
  MOD_RES (20), (20): Xaa is C or S
VNSSDDKYLVSIPSLKTPAXTPKTVH

SEQ ID NO: 6775 - protein, 17 aa, Artificial Sequence
  Cyclic GFR-binding peptide
  MOD_RES (14), (15): Xaa is C or S
FYLISIANLDQPVXXPS

SEQ ID NO: 6776 - protein, 16 aa, Artificial Sequence
  Cyclic GFR-binding peptide
  MOD_RES (14), (15): Xaa is C or S
LYLVSIASLKTPAXXA

SEQ ID NO: 6777 - protein, 18 aa, Artificial Sequence
  Cyclic GFR-binding peptide
  MOD_RES (14), (15): Xaa is C or S
LYLISIASLDQPVXXPSA

SEQ ID NO: 6778 - protein, 22 aa, Artificial Sequence
  Cyclic GFR-binding peptide
  MOD_RES (16), (17): Xaa is C or S
DDLYLVSIASLKTPAXXPKPVY

SEQ ID NO: 6779 - protein, 18 aa, Artificial Sequence
  Cyclic GFR-binding peptide
  MOD_RES (14), (15): Xaa is C or S
LYLVSIASLKTPVXXAKG

SEQ ID NO: 6780 - protein, 23 aa, Artificial Sequence
  Cyclic GFR-binding peptide
  MOD_RES (17), (18): Xaa is C or S
SSDFYLVSIANLKTPAXXAKPVA

SEQ ID NO: 6781 - protein, 21 aa, Artificial Sequence
  Cyclic GFR-binding peptide
  MOD_RES (15), (15): Xaa is C or S
DYYLVSTASLKTPAXTPKTVH

SEQ ID NO: 6782 - protein, 24 aa, Artificial Sequence
  Cyclic GFR-binding peptide
  MOD_RES (18), (19): Xaa is C or S
TKGIKYLISIPSLDQSVXXPSASA

SEQ ID NO: 6783 - protein, 27 aa, Artificial Sequence
  Cyclic GFR-binding peptide
  MOD_RES (21), (22): Xaa is C or S
TPVGMDDYYLVSTASLKTPVXXAKGVK

SEQ ID NO: 6784 - protein, 18 aa, Artificial Sequence
  Cyclic GFR-binding peptide
  MOD_RES (16), (16): Xaa is C or S
YYLVSTASLQVQTPRXQV

SEQ ID NO: 6785 - protein, 18 aa, Artificial Sequence
  Cyclic GFR-binding peptide
  MOD_RES (14), (15): Xaa is C or S
FYLMSIANLETPVXXAKP

SEQ ID NO: 6786 - protein, 13 aa, Artificial Sequence
  Cyclic GFR-binding peptide
YYLISTASLAQPV

SEQ ID NO: 6787 - protein, 17 aa, Artificial Sequence
  Cyclic GFR-binding peptide
TPVGMDDLYLVSIASLK

SEQ ID NO: 6788 - protein, 18 aa, Artificial Sequence
  Cyclic GFR-binding peptide
VVKDYEDKYLMSIPSLET

SEQ ID NO: 6789 - protein, 18 aa, Artificial Sequence
  Cyclic GFR-binding peptide
IKPTKGILYLISIASLDQ

SEQ ID NO: 6790 - protein, 16 aa, Artificial Sequence
  Cyclic GFR-binding peptide
TPVGMDDLYLVSIASL

SEQ ID NO: 6791 - protein, 17 aa, Artificial Sequence
  Cyclic GFR-binding peptide
  MOD_RES (16), (16): Xaa is C or S
YYLVSTASLQVQTPRXQ

SEQ ID NO: 6792 - protein, 17 aa, Artificial Sequence
  Cyclic GFR-binding peptide
  MOD_RES (14), (15): Xaa is C or S
KYLISIPSLAQPVXXPA

SEQ ID NO: 6793 - protein, 24 aa, Artificial Sequence
  Cyclic GFR-binding peptide
  MOD_RES (18), (18): Xaa is C or S
SSDDYYLVSTASLKTPAXTPKTVH

SEQ ID NO: 6794 - protein, 25 aa, Artificial Sequence
  Cyclic GFR-binding peptide
  MOD_RES (19), (20): Xaa is C or S
PTKGIFYLISIANLDQSVXXPSASA

SEQ ID NO: 6795 - protein, 18 aa, Artificial Sequence
  Cyclic GFR-binding peptide
  MOD_RES (14), (15): Xaa is C or S
FYLVSIANLKTPVXXAKG

SEQ ID NO: 6796 - protein, 27 aa, Artificial Sequence
  Cyclic GFR-binding peptide
  MOD_RES (21), (22): Xaa is C or S
IKPTKGILYLISIASLDQSVXXPSASA

SEQ ID NO: 6797 - protein, 17 aa, Artificial Sequence
  Cyclic GFR-binding peptide
FIPKKRVIEYYLVSTAS

SEQ ID NO: 6798 - protein, 15 aa, Artificial Sequence
  Cyclic GFR-binding peptide
  MOD_RES (14), (15): Xaa is C or S
YYLISTASLAQPVXX

SEQ ID NO: 6799 - protein, 21 aa, Artificial Sequence
  Cyclic GFR-binding peptide
  MOD_RES (15), (16): Xaa is C or S
VFYLISIANLDQPVXXPSASA

SEQ ID NO: 6800 - protein, 17 aa, Artificial Sequence
  Cyclic GFR-binding peptide
  MOD_RES (14), (15): Xaa is C or S
FYLISIANLAQPVXXPA

SEQ ID NO: 6801 - protein, 18 aa, Artificial Sequence
  Cyclic GFR-binding peptide
  MOD_RES (14), (15): Xaa is C or S
LYLISIASLAQPVXXPAA

SEQ ID NO: 6802 - protein, 26 aa, Artificial Sequence
  Cyclic GFR-binding peptide
  MOD_RES (20), (21): Xaa is C or S
VNSSDDLYLVSIASLQTPAXXPKPVT

SEQ ID NO: 6803 - protein, 18 aa, Artificial Sequence
  Cyclic GFR-binding peptide
VKPTRGVYYLISTASLDQ

SEQ ID NO: 6804 - protein, 26 aa, Artificial Sequence
  Cyclic GFR-binding peptide
  MOD_RES (20), (21): Xaa is C or S
VNSSDDYYLVSTASLKTPAXXPKPVY

SEQ ID NO: 6805 - protein, 19 aa, Artificial Sequence
  Cyclic GFR-binding peptide
IVNNSSDFYLVSIANLKTP

SEQ ID NO: 6806 - protein, 20 aa, Artificial Sequence
  Cyclic GFR-binding peptide
  MOD_RES (14), (14): Xaa is C or S
LYLVSIASLKTPAXTPKTVH

SEQ ID NO: 6807 - protein, 18 aa, Artificial Sequence
  Cyclic GFR-binding peptide
  MOD_RES (14), (15): Xaa is C or S
KYLISIPSLDQPVXXPSA

SEQ ID NO: 6808 - protein, 13 aa, Artificial Sequence
  Cyclic GFR-binding peptide
LYLVSIASLKTPA

SEQ ID NO: 6809 - protein, 19 aa, Artificial Sequence
  Cyclic GFR-binding peptide
  MOD_RES (14), (15): Xaa is C or S
YYLISTASLAQPVXXPAAS

SEQ ID NO: 6810 - protein, 21 aa, Artificial Sequence
  Cyclic GFR-binding peptide
FIPKKRVIEYYLVSTASLQVQ

SEQ ID NO: 6811 - protein, 25 aa, Artificial Sequence
  Cyclic GFR-binding peptide
  MOD_RES (21), (21): Xaa is C or S
KRVIEFYLVSIANLQVQTPRXQVNR

SEQ ID NO: 6812 - protein, 17 aa, Artificial Sequence
  Cyclic GFR-binding peptide
  MOD_RES (14), (15): Xaa is C or S
FYLVSIANLKTPAXXAK

SEQ ID NO: 6813 - protein, 23 aa, Artificial Sequence
  Cyclic GFR-binding peptide
  MOD_RES (17), (18): Xaa is C or S
MDDYYLVSTASLKTPVXXAKGVK

SEQ ID NO: 6814 - protein, 17 aa, Artificial Sequence
  Cyclic GFR-binding peptide
  MOD_RES (14), (15): Xaa is C or S
KYLISIPSLDQPVXXPS

SEQ ID NO: 6815 - protein, 26 aa, Artificial Sequence
  Cyclic GFR-binding peptide
  MOD_RES (20), (21): Xaa is C or S
KPTRGVLYLISIASLDQPVXXPSASA

SEQ ID NO: 6816 - protein, 17 aa, Artificial Sequence
  Cyclic GFR-binding peptide
VVKDYEDYYLMSTASLE

SEQ ID NO: 6817 - protein, 19 aa, Artificial Sequence
  Cyclic GFR-binding peptide
  MOD_RES (14), (15): Xaa is C or S
YYLISTASLDQPVXXPSAS

SEQ ID NO: 6818 - protein, 23 aa, Artificial Sequence
  Cyclic GFR-binding peptide
  MOD_RES (17), (18): Xaa is C or S
YEDYYLMSTASLETPVXXAKPIS

SEQ ID NO: 6819 - protein, 15 aa, Artificial Sequence
  Cyclic GFR-binding peptide
TPVGMDDLYLVSIAS

SEQ ID NO: 6820 - protein, 16 aa, Artificial Sequence
  Cyclic GFR-binding peptide
  MOD_RES (14), (15): Xaa is C or S
KYLISIPSLAQPVXXP

SEQ ID NO: 6821 - protein, 22 aa, Artificial Sequence
  Cyclic GFR-binding peptide
  MOD_RES (16), (17): Xaa is C or S
GILYLISIASLDQSVXXPSASA

SEQ ID NO: 6822 - protein, 16 aa, Artificial Sequence
  Cyclic GFR-binding peptide
  MOD_RES (14), (15): Xaa is C or S
YYLVSTASLKTPAXXP

SEQ ID NO: 6823 - protein, 26 aa, Artificial Sequence
  Cyclic GFR-binding peptide
  MOD_RES (20), (21): Xaa is C or S
KPKRGVFYLISIANLAQPVXXPAASA

SEQ ID NO: 6824 - protein, 22 aa, Artificial Sequence
  Cyclic GFR-binding peptide
  MOD_RES (16), (17): Xaa is C or S
SDLYLVSIASLKTPAXXAKPVA

SEQ ID NO: 6825 - protein, 23 aa, Artificial Sequence
  Cyclic GFR-binding peptide
  MOD_RES (17), (18): Xaa is C or S
SSDLYLVSIASLKTPAXXAKPVA

SEQ ID NO: 6826 - protein, 17 aa, Artificial Sequence
  Cyclic GFR-binding peptide
  MOD_RES (14), (15): Xaa is C or S
FYLVSIANLKTPVXXAK

SEQ ID NO: 6827 - protein, 15 aa, Artificial Sequence
  Cyclic GFR-binding peptide
FYLVSIANLQVQTPR

SEQ ID NO: 6828 - protein, 27 aa, Artificial Sequence
  Cyclic GFR-binding peptide
  MOD_RES (21), (22): Xaa is C or S
IKPTKGIKYLISIPSLDQSVXXPSASA

SEQ ID NO: 6829 - protein, 22 aa, Artificial Sequence
  Cyclic GFR-binding peptide
  MOD_RES (16), (17): Xaa is C or S
GVKYLISIPSLDQPVXXPSASA

SEQ ID NO: 6830 - protein, 15 aa, Artificial Sequence
  Cyclic GFR-binding peptide
  MOD_RES (14), (15): Xaa is C or S
FYLISIANLDQPVXX

SEQ ID NO: 6831 - protein, 14 aa, Artificial Sequence
  Cyclic GFR-binding peptide
  MOD_RES (14), (14): Xaa is C or S
KYLMSIPSLETPVX

SEQ ID NO: 6832 - protein, 17 aa, Artificial Sequence
  Cyclic GFR-binding peptide
  MOD_RES (14), (15): Xaa is C or S
YYLISTASLDQSVXXPS

SEQ ID NO: 6833 - protein, 18 aa, Artificial Sequence
  Cyclic GFR-binding peptide
IVNSSDDYYLVSTASLKT

SEQ ID NO: 6834 - protein, 22 aa, Artificial Sequence
  Cyclic GFR-binding peptide
  MOD_RES (16), (17): Xaa is C or S
GVYYLISTASLDQPVXXPSASA

SEQ ID NO: 6835 - protein, 18 aa, Artificial Sequence
  Cyclic GFR-binding peptide
IVNSSDDYYLVSTASLQT

SEQ ID NO: 6836 - protein, 21 aa, Artificial Sequence
  Cyclic GFR-binding peptide
  MOD_RES (17), (17): Xaa is C or S
ELYLVSIASLQVQTPRXQVNR

SEQ ID NO: 6837 - protein, 17 aa, Artificial Sequence
  Cyclic GFR-binding peptide
VVKENEDFYLMSIANLE

SEQ ID NO: 6838 - protein, 17 aa, Artificial Sequence
  Cyclic GFR-binding peptide
FIPKKRVIEKYLVSIPS

SEQ ID NO: 6839 - protein, 21 aa, Artificial Sequence
  Cyclic GFR-binding peptide
FIPKKRVIEKYLVSIPSLQVQ

SEQ ID NO: 6840 - protein, 21 aa, Artificial Sequence
  Cyclic GFR-binding peptide
  MOD_RES (15), (16): Xaa is C or S
DKYLVSIPSLKTPAXXAKPVA

SEQ ID NO: 6841 - protein, 24 aa, Artificial Sequence
  Cyclic GFR-binding peptide
  MOD_RES (18), (19): Xaa is C or S
SSDDKYLVSIPSLQTPAXXPKPVT

SEQ ID NO: 6842 - protein, 23 aa, Artificial Sequence
  Cyclic GFR-binding peptide
  MOD_RES (17), (17): Xaa is C or S
SDDYYLVSTASLKTPAXTPKTVH

SEQ ID NO: 6843 - protein, 14 aa, Artificial Sequence
  Cyclic GFR-binding peptide
  MOD_RES (14), (14): Xaa is C or S
LYLISIASLDQPVX

SEQ ID NO: 6844 - protein, 16 aa, Artificial Sequence
  Cyclic GFR-binding peptide
VVKDYEDYYLMSTASL

SEQ ID NO: 6845 - protein, 15 aa, Artificial Sequence
  Cyclic GFR-binding peptide
  MOD_RES (14), (14): Xaa is C or S
KYLVSIPSLKTPAXT

SEQ ID NO: 6846 - protein, 22 aa, Artificial Sequence
  Cyclic GFR-binding peptide
  MOD_RES (16), (17): Xaa is C or S
EDYYLMSTASLETPVXXAKPIK

SEQ ID NO: 6847 - protein, 18 aa, Artificial Sequence
  Cyclic GFR-binding peptide
  MOD_RES (14), (15): Xaa is C or S
LYLVSIASLKTPAXXPKP

SEQ ID NO: 6848 - protein, 18 aa, Artificial Sequence
  Cyclic GFR-binding peptide
VVKDYEDFYLMSIANLET

SEQ ID NO: 6849 - protein, 14 aa, Artificial Sequence
  Cyclic GFR-binding peptide
  MOD_RES (14), (14): Xaa is C or S
FYLISIANLDQSVX

SEQ ID NO: 6850 - protein, 26 aa, Artificial Sequence
  Cyclic GFR-binding peptide
  MOD_RES (20), (21): Xaa is C or S
VNSSDDKYLVSIPSLQTPAXXPKPVT

SEQ ID NO: 6851 - protein, 21 aa, Artificial Sequence
  Cyclic GFR-binding peptide
  MOD_RES (15), (16): Xaa is C or S
DYYLMSTASLETPVXXAKPIK

SEQ ID NO: 6852 - protein, 15 aa, Artificial Sequence
  Cyclic GFR-binding peptide
  MOD_RES (14), (15): Xaa is C or S
KYLMSIPSLETPVXX

SEQ ID NO: 6853 - protein, 26 aa, Artificial Sequence
  Cyclic GFR-binding peptide
  MOD_RES (20), (21): Xaa is C or S
VNSSDDKYLVSIPSLKTPAXXPKPVY

SEQ ID NO: 6854 - protein, 14 aa, Artificial Sequence
  Cyclic GFR-binding peptide
  MOD_RES (14), (14): Xaa is C or S
FYLISIANLDQPVX

SEQ ID NO: 6855 - protein, 13 aa, Artificial Sequence
  Cyclic GFR-binding peptide
FYLISIANLDQPV

SEQ ID NO: 6856 - protein, 25 aa, Artificial Sequence
  Cyclic GFR-binding peptide
  MOD_RES (21), (21): Xaa is C or S
KRVIEKYLVSIPSLQVQTPRXQVNR

SEQ ID NO: 6857 - protein, 15 aa, Artificial Sequence
  Cyclic GFR-binding peptide
  MOD_RES (14), (15): Xaa is C or S
YYLISTASLDQSVXX

SEQ ID NO: 6858 - protein, 15 aa, Artificial Sequence
  Cyclic GFR-binding peptide
IVNNSSDFYLVSIAN

SEQ ID NO: 6859 - protein, 22 aa, Artificial Sequence
  Cyclic GFR-binding peptide
  MOD_RES (16), (17): Xaa is C or S
DDYYLVSTASLKTPAXXPKPVY

SEQ ID NO: 6860 - protein, 16 aa, Artificial Sequence
  Cyclic GFR-binding peptide
VVKENEDKYLMSIPSL

SEQ ID NO: 6861 - protein, 15 aa, Artificial Sequence
  Cyclic GFR-binding peptide
  MOD_RES (14), (15): Xaa is C or S
LYLVSIASLKTPAXX

SEQ ID NO: 6862 - protein, 15 aa, Artificial Sequence
  Cyclic GFR-binding peptide
TPVGMDDYYLVSTAS

SEQ ID NO: 6863 - protein, 16 aa, Artificial Sequence
  Cyclic GFR-binding peptide
  MOD_RES (14), (15): Xaa is C or S
FYLVSIANLKTPVXXA

SEQ ID NO: 6864 - protein, 25 aa, Artificial Sequence
  Cyclic GFR-binding peptide
  MOD_RES (19), (20): Xaa is C or S
PTKGIKYLISIPSLDQSVXXPSASA

SEQ ID NO: 6865 - protein, 16 aa, Artificial Sequence
  Cyclic GFR-binding peptide
  MOD_RES (14), (15): Xaa is C or S
KYLISIPSLDQSVXXP

SEQ ID NO: 6866 - protein, 24 aa, Artificial Sequence
  Cyclic GFR-binding peptide
  MOD_RES (18), (19): Xaa is C or S
DYEDFYLMSIANLETPVXXAKPIS

SEQ ID NO: 6867 - protein, 25 aa, Artificial Sequence
  Cyclic GFR-binding peptide
  MOD_RES (19), (20): Xaa is C or S
VGMDDFYLVSIANLKTPVXXAKGVK

SEQ ID NO: 6868 - protein, 18 aa, Artificial Sequence
  Cyclic GFR-binding peptide
  MOD_RES (14), (15): Xaa is C or S
FYLISIANLDQSVXXPSA

SEQ ID NO: 6869 - protein, 20 aa, Artificial Sequence
  Cyclic GFR-binding peptide
  MOD_RES (14), (15): Xaa is C or S
YYLVSTASLKTPAXXPKPVY

SEQ ID NO: 6870 - protein, 16 aa, Artificial Sequence
  Cyclic GFR-binding peptide
  MOD_RES (14), (15): Xaa is C or S
LYLVSIASLKTPVXXA

SEQ ID NO: 6871 - protein, 26 aa, Artificial Sequence
  Cyclic GFR-binding peptide
  MOD_RES (20), (20): Xaa is C or S
VNSSDDYYLVSTASLKTPAXTPKTVH

SEQ ID NO: 6872 - protein, 25 aa, Artificial Sequence
  Cyclic GFR-binding peptide
  MOD_RES (19), (20): Xaa is C or S
PKRGVYYLISTASLAQPVXXPAASA

SEQ ID NO: 6873 - protein, 19 aa, Artificial Sequence
  Cyclic GFR-binding peptide
VVKENEDKYLMSIPSLETP

SEQ ID NO: 6874 - protein, 19 aa, Artificial Sequence
  Cyclic GFR-binding peptide
  MOD_RES (16), (16): Xaa is C or S
FYLVSIANLQVQTPRXQVN

SEQ ID NO: 6875 - protein, 28 aa, Artificial Sequence
  Cyclic GFR-binding peptide
  MOD_RES (24), (24): Xaa is C or S
IPKKRVIEFYLVSIANLQVQTPRXQVNR

SEQ ID NO: 6876 - protein, 18 aa, Artificial Sequence
  Cyclic GFR-binding peptide
FIPKKRVIEKYLVSIPSL

SEQ ID NO: 6877 - protein, 17 aa, Artificial Sequence
  Cyclic GFR-binding peptide
TPVGMDDFYLVSIANLK

SEQ ID NO: 6878 - protein, 27 aa, Artificial Sequence
  Cyclic GFR-binding peptide
  MOD_RES (21), (22): Xaa is C or S
IVNSSDDKYLVSIPSLKTPAXXPKPVY

SEQ ID NO: 6879 - protein, 18 aa, Artificial Sequence
  Cyclic GFR-binding peptide
IVNNSSDKYLVSIPSLKT

SEQ ID NO: 6880 - protein, 18 aa, Artificial Sequence
  Cyclic GFR-binding peptide
IKPTKGIYYLISTASLDQ

SEQ ID NO: 6881 - protein, 19 aa, Artificial Sequence
  Cyclic GFR-binding peptide
  MOD_RES (14), (15): Xaa is C or S
YYLMSTASLETPVXXAKPI

SEQ ID NO: 6882 - protein, 19 aa, Artificial Sequence
  Cyclic GFR-binding peptide
VVKDYEDYYLMSTASLETP

SEQ ID NO: 6883 - protein, 18 aa, Artificial Sequence
  Cyclic GFR-binding peptide
  MOD_RES (14), (15): Xaa is C or S
LYLISIASLDQSVXXPSA

SEQ ID NO: 6884 - protein, 27 aa, Artificial Sequence
  Cyclic GFR-binding peptide
  MOD_RES (21), (22): Xaa is C or S
IKPTKGIFYLISIANLDQSVXXPSASA

SEQ ID NO: 6885 - protein, 15 aa, Artificial Sequence
  Cyclic GFR-binding peptide
VVKENEDYYLMSTAS

SEQ ID NO: 6886 - protein, 17 aa, Artificial Sequence
  Cyclic GFR-binding peptide
  MOD_RES (14), (15): Xaa is C or S
KYLISIPSLDQSVXXPS

SEQ ID NO: 6887 - protein, 17 aa, Artificial Sequence
  Cyclic GFR-binding peptide
FIPKKRVIEFYLVSIAN

SEQ ID NO: 6888 - protein, 17 aa, Artificial Sequence
  Cyclic GFR-binding peptide
IKPTKGILYLISIASLD

SEQ ID NO: 6889 - protein, 17 aa, Artificial Sequence
  Cyclic GFR-binding peptide
IVNNSSDFYLVSIANLK

SEQ ID NO: 6890 - protein, 14 aa, Artificial Sequence
  Cyclic GFR-binding peptide
  MOD_RES (14), (14): Xaa is C or S
FYLISIANLAQPVX

SEQ ID NO: 6891 - protein, 27 aa, Artificial Sequence
  Cyclic GFR-binding peptide
  MOD_RES (21), (22): Xaa is C or S
VKPTRGVFYLISIANLDQPVXXPSASA

SEQ ID NO: 6892 - protein, 21 aa, Artificial Sequence
  Cyclic GFR-binding peptide
  MOD_RES (15), (16): Xaa is C or S
DYYLMSTASLETPVXXAKPIS

SEQ ID NO: 6893 - protein, 17 aa, Artificial Sequence
  Cyclic GFR-binding peptide
  MOD_RES (14), (15): Xaa is C or S
LYLVSIASLKTPAXXAK

SEQ ID NO: 6894 - protein, 21 aa, Artificial Sequence
  Cyclic GFR-binding peptide
  MOD_RES (15), (16): Xaa is C or S
VYYLISTASLAQPVXXPAASA

SEQ ID NO: 6895 - protein, 17 aa, Artificial Sequence
  Cyclic GFR-binding peptide
IKPTKGIFYLISIANLD

SEQ ID NO: 6896 - protein, 25 aa, Artificial Sequence
  Cyclic GFR-binding peptide
  MOD_RES (19), (20): Xaa is C or S
PTKGILYLISIASLDQSVXXPSASA

SEQ ID NO: 6897 - protein, 23 aa, Artificial Sequence
  Cyclic GFR-binding peptide
  MOD_RES (17), (18): Xaa is C or S
KGILYLISIASLDQSVXXPSASA

SEQ ID NO: 6898 - protein, 20 aa, Artificial Sequence
  Cyclic GFR-binding peptide
FIPKKRVIEKYLVSIPSLQV

SEQ ID NO: 6899 - protein, 22 aa, Artificial Sequence
  Cyclic GFR-binding peptide
  MOD_RES (18), (18): Xaa is C or S
IEKYLVSIPSLQVQTPRXQVNR

SEQ ID NO: 6900 - protein, 24 aa, Artificial Sequence
  Cyclic GFR-binding peptide
  MOD_RES (18), (19): Xaa is C or S
KRGVKYLISIPSLAQPVXXPAASA

SEQ ID NO: 6901 - protein, 26 aa, Artificial Sequence
  Cyclic GFR-binding peptide
  MOD_RES (20), (21): Xaa is C or S
KPTRGVYYLISTASLDQPVXXPSASA

SEQ ID NO: 6902 - protein, 24 aa, Artificial Sequence
  Cyclic GFR-binding peptide
  MOD_RES (18), (18): Xaa is C or S
SSDDLYLVSIASLKTPAXTPKTVH

SEQ ID NO: 6903 - protein, 19 aa, Artificial Sequence
  Cyclic GFR-binding peptide
  MOD_RES (14), (15): Xaa is C or S
KYLMSIPSLETPVXXAKPI

SEQ ID NO: 6904 - protein, 16 aa, Artificial Sequence
  Cyclic GFR-binding peptide
IKPTKGIKYLISIPSL

SEQ ID NO: 6905 - protein, 27 aa, Artificial Sequence
  Cyclic GFR-binding peptide
  MOD_RES (21), (22): Xaa is C or S
VVKDYEDYYLMSTASLETPVXXAKPIS

SEQ ID NO: 6906 - protein, 24 aa, Artificial Sequence
  Cyclic GFR-binding peptide
  MOD_RES (18), (19): Xaa is C or S
SSDDLYLVSIASLKTPAXXPKPVY

SEQ ID NO: 6907 - protein, 26 aa, Artificial Sequence
  Cyclic GFR-binding peptide
  MOD_RES (20), (21): Xaa is C or S
VKDYEDKYLMSIPSLETPVXXAKPIS

SEQ ID NO: 6908 - protein, 17 aa, Artificial Sequence
  Cyclic GFR-binding peptide
  MOD_RES (14), (15): Xaa is C or S
YYLISTASLDQPVXXPS

SEQ ID NO: 6909 - protein, 27 aa, Artificial Sequence
  Cyclic GFR-binding peptide
  MOD_RES (21), (22): Xaa is C or S
VKPTRGVLYLISIASLDQPVXXPSASA

SEQ ID NO: 6910 - protein, 16 aa, Artificial Sequence
  Cyclic GFR-binding peptide
  MOD_RES (14), (15): Xaa is C or S
KYLMSIPSLETPVXXA

SEQ ID NO: 6911 - protein, 19 aa, Artificial Sequence
  Cyclic GFR-binding peptide
  MOD_RES (16), (16): Xaa is C or S
LYLVSIASLQVQTPRXQVN

SEQ ID NO: 6912 - protein, 19 aa, Artificial Sequence
  Cyclic GFR-binding peptide
TPVGMDDFYLVSIANLKTP

SEQ ID NO: 6913 - protein, 24 aa, Artificial Sequence
  Cyclic GFR-binding peptide
  MOD_RES (18), (19): Xaa is C or S
GMDDYYLVSTASLKTPVXXAKGVK

SEQ ID NO: 6914 - protein, 17 aa, Artificial Sequence
  Cyclic GFR-binding peptide
VKPKRGVYYLISTASLA

SEQ ID NO: 6915 - protein, 16 aa, Artificial Sequence
  Cyclic GFR-binding peptide
VKPKRGVLYLISIASL

SEQ ID NO: 6916 - protein, 18 aa, Artificial Sequence
  Cyclic GFR-binding peptide
  MOD_RES (14), (14): Xaa is C or S
YYLVSTASLKTPAXTPKT

SEQ ID NO: 6917 - protein, 13 aa, Artificial Sequence
  Cyclic GFR-binding peptide
KYLMSIPSLETPV

SEQ ID NO: 6918 - protein, 21 aa, Artificial Sequence
  Cyclic GFR-binding peptide
  MOD_RES (15), (16): Xaa is C or S
DYYLVSTASLQTPAXXPKPVT

SEQ ID NO: 6919 - protein, 16 aa, Artificial Sequence
  Cyclic GFR-binding peptide
VKPTRGVFYLISIANL

SEQ ID NO: 6920 - protein, 21 aa, Artificial Sequence
  Cyclic GFR-binding peptide
  MOD_RES (15), (16): Xaa is C or S
DFYLVSIANLKTPAXXAKPVA

SEQ ID NO: 6921 - protein, 13 aa, Artificial Sequence
  Cyclic GFR-binding peptide
FYLVSIANLKTPV

SEQ ID NO: 6922 - protein, 17 aa, Artificial Sequence
  Cyclic GFR-binding peptide
VVKDYEDFYLMSIANLE

SEQ ID NO: 6923 - protein, 14 aa, Artificial Sequence
  Cyclic GFR-binding peptide
  MOD_RES (14), (14): Xaa is C or S
KYLISIPSLDQSVX

SEQ ID NO: 6924 - protein, 19 aa, Artificial Sequence
  Cyclic GFR-binding peptide
  MOD_RES (14), (15): Xaa is C or S
FYLVSIANLKTPAXXAKPV

SEQ ID NO: 6925 - protein, 24 aa, Artificial Sequence
  Cyclic GFR-binding peptide
  MOD_RES (18), (19): Xaa is C or S
SSDDKYLVSIPSLKTPAXXPKPVY

SEQ ID NO: 6926 - protein, 15 aa, Artificial Sequence
  Cyclic GFR-binding peptide
IVNNSSDKYLVSIPS

SEQ ID NO: 6927 - protein, 25 aa, Artificial Sequence
  Cyclic GFR-binding peptide
  MOD_RES (19), (20): Xaa is C or S
PKRGVFYLISIANLAQPVXXPAASA

SEQ ID NO: 6928 - protein, 21 aa, Artificial Sequence
  Cyclic GFR-binding peptide
  MOD_RES (17), (17): Xaa is C or S
EKYLVSIPSLQVQTPRXQVNR

SEQ ID NO: 6929 - protein, 16 aa, Artificial Sequence
  Cyclic GFR-binding peptide
  MOD_RES (16), (16): Xaa is C or S
FYLVSIANLQVQTPRX

SEQ ID NO: 6930 - protein, 21 aa, Artificial Sequence
  Cyclic GFR-binding peptide
  MOD_RES (15), (16): Xaa is C or S
DKYLVSIPSLKTPAXXPKPVY

SEQ ID NO: 6931 - protein, 15 aa, Artificial Sequence
  Cyclic GFR-binding peptide
VVKDYEDKYLMSIPS

SEQ ID NO: 6932 - protein, 27 aa, Artificial Sequence
  Cyclic GFR-binding peptide
  MOD_RES (21), (22): Xaa is C or S
IVNSSDDLYLVSIASLQTPAXXPKPVT

SEQ ID NO: 6933 - protein, 23 aa, Artificial Sequence
  Cyclic GFR-binding peptide
  MOD_RES (17), (18): Xaa is C or S
SDDKYLVSIPSLQTPAXXPKPVT

SEQ ID NO: 6934 - protein, 19 aa, Artificial Sequence
  Cyclic GFR-binding peptide
  MOD_RES (14), (15): Xaa is C or S
FYLISIANLDQPVXXPSAS

SEQ ID NO: 6935 - protein, 19 aa, Artificial Sequence
  Cyclic GFR-binding peptide
  MOD_RES (14), (15): Xaa is C or S
LYLVSIASLKTPVXXAKGV

SEQ ID NO: 6936 - protein, 19 aa, Artificial Sequence
  Cyclic GFR-binding peptide
  MOD_RES (14), (15): Xaa is C or S
KYLVSIPSLKTPAXXAKPV

SEQ ID NO: 6937 - protein, 17 aa, Artificial Sequence
  Cyclic GFR-binding peptide
IVNNSSDLYLVSIASLK

SEQ ID NO: 6938 - protein, 16 aa, Artificial Sequence
  Cyclic GFR-binding peptide
  MOD_RES (14), (15): Xaa is C or S
FYLMSIANLETPVXXA

SEQ ID NO: 6939 - protein, 17 aa, Artificial Sequence
  Cyclic GFR-binding peptide
  MOD_RES (14), (15): Xaa is C or S
YYLISTASLAQPVXXPA

SEQ ID NO: 6940 - protein, 27 aa, Artificial Sequence
  Cyclic GFR-binding peptide
  MOD_RES (21), (22): Xaa is C or S
IVNSSDDLYLVSIASLKTPAXXPKPVY

SEQ ID NO: 6941 - protein, 20 aa, Artificial Sequence
  Cyclic GFR-binding peptide
  MOD_RES (14), (15): Xaa is C or S
LYLVSIASLKTPAXXAKPVA

SEQ ID NO: 6942 - protein, 22 aa, Artificial Sequence
  Cyclic GFR-binding peptide
  MOD_RES (18), (18): Xaa is C or S
IEFYLVSIANLQVQTPRXQVNR

SEQ ID NO: 6943 - protein, 19 aa, Artificial Sequence
  Cyclic GFR-binding peptide
IVNSSDDLYLVSIASLQTP

SEQ ID NO: 6944 - protein, 19 aa, Artificial Sequence
  Cyclic GFR-binding peptide
TPVGMDDYYLVSTASLKTP

SEQ ID NO: 6945 - protein, 17 aa, Artificial Sequence
  Cyclic GFR-binding peptide
VVKDYEDKYLMSIPSLE

SEQ ID NO: 6946 - protein, 17 aa, Artificial Sequence
  Cyclic GFR-binding peptide
  MOD_RES (14), (15): Xaa is C or S
LYLISIASLAQPVXXPA

SEQ ID NO: 6947 - protein, 20 aa, Artificial Sequence
  Cyclic GFR-binding peptide
FIPKKRVIEYYLVSTASLQV

SEQ ID NO: 6948 - protein, 16 aa, Artificial Sequence
  Cyclic GFR-binding peptide
  MOD_RES (14), (14): Xaa is C or S
LYLVSIASLKTPAXTP

SEQ ID NO: 6949 - protein, 15 aa, Artificial Sequence
  Cyclic GFR-binding peptide
IVNNSSDLYLVSIAS

SEQ ID NO: 6950 - protein, 25 aa, Artificial Sequence
  Cyclic GFR-binding peptide
  MOD_RES (19), (20): Xaa is C or S
PKRGVKYLISIPSLAQPVXXPAASA

SEQ ID NO: 6951 - protein, 23 aa, Artificial Sequence
  Cyclic GFR-binding peptide
  MOD_RES (17), (18): Xaa is C or S
KGIFYLISIANLDQSVXXPSASA

SEQ ID NO: 6952 - protein, 16 aa, Artificial Sequence
  Cyclic GFR-binding peptide
VKPTRGVLYLISIASL

SEQ ID NO: 6953 - protein, 24 aa, Artificial Sequence
  Cyclic GFR-binding peptide
  MOD_RES (18), (19): Xaa is C or S
KRGVLYLISIASLAQPVXXPAASA

SEQ ID NO: 6954 - protein, 24 aa, Artificial Sequence
  Cyclic GFR-binding peptide
  MOD_RES (18), (19): Xaa is C or S
NSSDKYLVSIPSLKTPAXXAKPVA

SEQ ID NO: 6955 - protein, 17 aa, Artificial Sequence
  Cyclic GFR-binding peptide
IKPTKGIKYLISIPSLD

SEQ ID NO: 6956 - protein, 17 aa, Artificial Sequence
  Cyclic GFR-binding peptide
  MOD_RES (14), (15): Xaa is C or S
YYLVSTASLKTPAXXPK

SEQ ID NO: 6957 - protein, 22 aa, Artificial Sequence
  Cyclic GFR-binding peptide
  MOD_RES (16), (17): Xaa is C or S
GVFYLISIANLAQPVXXPAASA

SEQ ID NO: 6958 - protein, 25 aa, Artificial Sequence
  Cyclic GFR-binding peptide
  MOD_RES (19), (20): Xaa is C or S
VGMDDYYLVSTASLKTPVXXAKGVK

SEQ ID NO: 6959 - protein, 15 aa, Artificial Sequence
  Cyclic GFR-binding peptide
IVNSSDDYYLVSTAS

SEQ ID NO: 6960 - protein, 20 aa, Artificial Sequence
  Cyclic GFR-binding peptide
  MOD_RES (14), (15): Xaa is C or S
LYLVSIASLKTPVXXAKGVK

SEQ ID NO: 6961 - protein, 23 aa, Artificial Sequence
  Cyclic GFR-binding peptide
  MOD_RES (17), (17): Xaa is C or S
SDDLYLVSIASLKTPAXTPKTVH

SEQ ID NO: 6962 - protein, 16 aa, Artificial Sequence
  Cyclic GFR-binding peptide
  MOD_RES (14), (15): Xaa is C or S
KYLVSIPSLKTPAXXA

SEQ ID NO: 6963 - protein, 19 aa, Artificial Sequence
  Cyclic GFR-binding peptide
FIPKKRVIELYLVSIASLQ

SEQ ID NO: 6964 - protein, 24 aa, Artificial Sequence
  Cyclic GFR-binding peptide
  MOD_RES (18), (19): Xaa is C or S
ENEDFYLMSIANLETPVXXAKPIK

SEQ ID NO: 6965 - protein, 19 aa, Artificial Sequence
  Cyclic GFR-binding peptide
VKPKRGVFYLISIANLAQP

SEQ ID NO: 6966 - protein, 25 aa, Artificial Sequence
  Cyclic GFR-binding peptide
  MOD_RES (19), (20): Xaa is C or S
NNSSDKYLVSIPSLKTPAXXAKPVA

SEQ ID NO: 6967 - protein, 23 aa, Artificial Sequence
  Cyclic GFR-binding peptide
  MOD_RES (17), (18): Xaa is C or S
RGVKYLISIPSLDQPVXXPSASA

SEQ ID NO: 6968 - protein, 13 aa, Artificial Sequence
  Cyclic GFR-binding peptide
LYLVSIASLKTPV

SEQ ID NO: 6969 - protein, 16 aa, Artificial Sequence
  Cyclic GFR-binding peptide
  MOD_RES (14), (15): Xaa is C or S
LYLVSIASLKTPAXXP

SEQ ID NO: 6970 - protein, 15 aa, Artificial Sequence
  Cyclic GFR-binding peptide
  MOD_RES (14), (15): Xaa is C or S
YYLISTASLDQPVXX

SEQ ID NO: 6971 - protein, 15 aa, Artificial Sequence
  Cyclic GFR-binding peptide
VVKDYEDFYLMSIAN

SEQ ID NO: 6972 - protein, 20 aa, Artificial Sequence
  Cyclic GFR-binding peptide
  MOD_RES (14), (15): Xaa is C or S
YYLVSTASLKTPVXXAKGVK

SEQ ID NO: 6973 - protein, 14 aa, Artificial Sequence
  Cyclic GFR-binding peptide
LYLVSIASLQVQTP

SEQ ID NO: 6974 - protein, 18 aa, Artificial Sequence
  Cyclic GFR-binding peptide
TPVGMDDLYLVSIASLKT

SEQ ID NO: 6975 - protein, 16 aa, Artificial Sequence
  Cyclic GFR-binding peptide
IVNSSDDKYLVSIPSL

SEQ ID NO: 6976 - protein, 16 aa, Artificial Sequence
  Cyclic GFR-binding peptide
VKPKRGVKYLISIPSL

SEQ ID NO: 6977 - protein, 13 aa, Artificial Sequence
  Cyclic GFR-binding peptide
FYLISIANLDQSV

SEQ ID NO: 6978 - protein, 16 aa, Artificial Sequence
  Cyclic GFR-binding peptide
  MOD_RES (14), (15): Xaa is C or S
KYLISIPSLDQPVXXP

SEQ ID NO: 6979 - protein, 15 aa, Artificial Sequence
  Cyclic GFR-binding peptide
  MOD_RES (14), (15): Xaa is C or S
KYLISIPSLDQSVXX

SEQ ID NO: 6980 - protein, 27 aa, Artificial Sequence
  Cyclic GFR-binding peptide
  MOD_RES (21), (22): Xaa is C or S
IVNSSDDKYLVSIPSLQTPAXXPKPVT

SEQ ID NO: 6981 - protein, 26 aa, Artificial Sequence
  Cyclic GFR-binding peptide
  MOD_RES (20), (21): Xaa is C or S
VKENEDKYLMSIPSLETPVXXAKPIK

SEQ ID NO: 6982 - protein, 22 aa, Artificial Sequence
  Cyclic GFR-binding peptide
  MOD_RES (16), (17): Xaa is C or S
DDLYLVSIASLKTPVXXAKGVK

SEQ ID NO: 6983 - protein, 17 aa, Artificial Sequence
  Cyclic GFR-binding peptide
  MOD_RES (14), (14): Xaa is C or S
KYLVSIPSLKTPAXTPK

SEQ ID NO: 6984 - protein, 19 aa, Artificial Sequence
  Cyclic GFR-binding peptide
IVNSSDDLYLVSIASLKTP

SEQ ID NO: 6985 - protein, 14 aa, Artificial Sequence
  Cyclic GFR-binding peptide
  MOD_RES (14), (14): Xaa is C or S
YYLISTASLDQSVX

SEQ ID NO: 6986 - protein, 13 aa, Artificial Sequence
  Cyclic GFR-binding peptide
YYLMSTASLETPV

SEQ ID NO: 6987 - protein, 16 aa, Artificial Sequence
  Cyclic GFR-binding peptide
VKPTRGVKYLISIPSL

SEQ ID NO: 6988 - protein, 15 aa, Artificial Sequence
  Cyclic GFR-binding peptide
  MOD_RES (14), (15): Xaa is C or S
KYLISIPSLAQPVXX

SEQ ID NO: 6989 - protein, 19 aa, Artificial Sequence
  Cyclic GFR-binding peptide
VKPKRGVYYLISTASLAQP

SEQ ID NO: 6990 - protein, 24 aa, Artificial Sequence
  Cyclic GFR-binding peptide
  MOD_RES (18), (19): Xaa is C or S
TRGVFYLISIANLDQPVXXPSASA

SEQ ID NO: 6991 - protein, 19 aa, Artificial Sequence
  Cyclic GFR-binding peptide
FIPKKRVIEFYLVSIANLQ

SEQ ID NO: 6992 - protein, 17 aa, Artificial Sequence
  Cyclic GFR-binding peptide
IVNSSDDYYLVSTASLQ

SEQ ID NO: 6993 - protein, 16 aa, Artificial Sequence
  Cyclic GFR-binding peptide
  MOD_RES (14), (15): Xaa is C or S
YYLMSTASLETPVXXA

SEQ ID NO: 6994 - protein, 21 aa, Artificial Sequence
  Cyclic GFR-binding peptide
  MOD_RES (15), (16): Xaa is C or S
DFYLVSIANLKTPVXXAKGVK

SEQ ID NO: 6995 - protein, 19 aa, Artificial Sequence
  Cyclic GFR-binding peptide
  MOD_RES (14), (15): Xaa is C or S
FYLISIANLDQSVXXPSAS

SEQ ID NO: 6996 - protein, 17 aa, Artificial Sequence
  Cyclic GFR-binding peptide
  MOD_RES (14), (14): Xaa is C or S
YYLVSTASLKTPAXTPK

SEQ ID NO: 6997 - protein, 21 aa, Artificial Sequence
  Cyclic GFR-binding peptide
  MOD_RES (15), (16): Xaa is C or S
IYYLISTASLDQSVXXPSASA

SEQ ID NO: 6998 - protein, 17 aa, Artificial Sequence
  Cyclic GFR-binding peptide
IVNSSDDYYLVSTASLK

SEQ ID NO: 6999 - protein, 18 aa, Artificial Sequence
  Cyclic GFR-binding peptide
VKPKRGVFYLISIANLAQ

SEQ ID NO: 7000 - protein, 16 aa, Artificial Sequence
  Cyclic GFR-binding peptide
IKPTKGIFYLISIANL

SEQ ID NO: 7001 - protein, 18 aa, Artificial Sequence
  Cyclic GFR-binding peptide
  MOD_RES (14), (15): Xaa is C or S
KYLISIPSLAQPVXXPAA

SEQ ID NO: 7002 - protein, 13 aa, Artificial Sequence
  Cyclic GFR-binding peptide
YYLVSTASLKTPV

SEQ ID NO: 7003 - protein, 20 aa, Artificial Sequence
  Cyclic GFR-binding peptide
  MOD_RES (14), (15): Xaa is C or S
LYLVSIASLKTPAXXPKPVY

SEQ ID NO: 7004 - protein, 18 aa, Artificial Sequence
  Cyclic GFR-binding peptide
VKPKRGVLYLISIASLAQ

SEQ ID NO: 7005 - protein, 25 aa, Artificial Sequence
  Cyclic GFR-binding peptide
  MOD_RES (19), (20): Xaa is C or S
NNSSDFYLVSIANLKTPAXXAKPVA

SEQ ID NO: 7006 - protein, 25 aa, Artificial Sequence
  Cyclic GFR-binding peptide
  MOD_RES (19), (19): Xaa is C or S
NSSDDKYLVSIPSLKTPAXTPKTVH

SEQ ID NO: 7007 - protein, 20 aa, Artificial Sequence
  Cyclic GFR-binding peptide
  MOD_RES (14), (15): Xaa is C or S
FYLVSIANLKTPVXXAKGVK

SEQ ID NO: 7008 - protein, 18 aa, Artificial Sequence
  Cyclic GFR-binding peptide
  MOD_RES (14), (15): Xaa is C or S
KYLVSIPSLQTPAXXPKP

SEQ ID NO: 7009 - protein, 18 aa, Artificial Sequence
  Cyclic GFR-binding peptide
VVKDYEDYYLMSTASLET

SEQ ID NO: 7010 - protein, 26 aa, Artificial Sequence
  Cyclic GFR-binding peptide
  MOD_RES (20), (21): Xaa is C or S
KPTKGIKYLISIPSLDQSVXXPSASA

SEQ ID NO: 7011 - protein, 13 aa, Artificial Sequence
  Cyclic GFR-binding peptide
KYLVSIPSLQTPA

SEQ ID NO: 7012 - protein, 27 aa, Artificial Sequence
  Cyclic GFR-binding peptide
  MOD_RES (21), (22): Xaa is C or S
VKPTRGVKYLISIPSLDQPVXXPSASA

SEQ ID NO: 7013 - protein, 25 aa, Artificial Sequence
  Cyclic GFR-binding peptide
  MOD_RES (19), (20): Xaa is C or S
PTRGVLYLISIASLDQPVXXPSASA

SEQ ID NO: 7014 - protein, 23 aa, Artificial Sequence
  Cyclic GFR-binding peptide
  MOD_RES (17), (18): Xaa is C or S
SDDYYLVSTASLKTPAXXPKPVY

SEQ ID NO: 7015 - protein, 24 aa, Artificial Sequence
  Cyclic GFR-binding peptide
  MOD_RES (18), (19): Xaa is C or S
NSSDFYLVSIANLKTPAXXAKPVA

SEQ ID NO: 7016 - protein, 14 aa, Artificial Sequence
  Cyclic GFR-binding peptide
  MOD_RES (14), (14): Xaa is C or S
YYLISTASLAQPVX

SEQ ID NO: 7017 - protein, 25 aa, Artificial Sequence
  Cyclic GFR-binding peptide
  MOD_RES (19), (20): Xaa is C or S
PKRGVLYLISIASLAQPVXXPAASA

SEQ ID NO: 7018 - protein, 26 aa, Artificial Sequence
  Cyclic GFR-binding peptide
  MOD_RES (20), (21): Xaa is C or S
VKENEDYYLMSTASLETPVXXAKPIK

SEQ ID NO: 7019 - protein, 22 aa, Artificial Sequence
  Cyclic GFR-binding peptide
  MOD_RES (16), (17): Xaa is C or S
EDFYLMSIANLETPVXXAKPIK

SEQ ID NO: 7020 - protein, 20 aa, Artificial Sequence
  Cyclic GFR-binding peptide
  MOD_RES (14), (15): Xaa is C or S
YYLISTASLAQPVXXPAASA

SEQ ID NO: 7021 - protein, 25 aa, Artificial Sequence
  Cyclic GFR-binding peptide
  MOD_RES (19), (19): Xaa is C or S
NSSDDYYLVSTASLKTPAXTPKTVH

SEQ ID NO: 7022 - protein, 18 aa, Artificial Sequence
  Cyclic GFR-binding peptide
  MOD_RES (14), (15): Xaa is C or S
YYLVSTASLKTPAXXPKP

SEQ ID NO: 7023 - protein, 14 aa, Artificial Sequence
  Cyclic GFR-binding peptide
  MOD_RES (14), (14): Xaa is C or S
KYLISIPSLDQPVX

SEQ ID NO: 7024 - protein, 23 aa, Artificial Sequence
  Cyclic GFR-binding peptide
  MOD_RES (17), (18): Xaa is C or S
SDDYYLVSTASLQTPAXXPKPVT

SEQ ID NO: 7025 - protein, 27 aa, Artificial Sequence
  Cyclic GFR-binding peptide
  MOD_RES (21), (22): Xaa is C or S
VKPKRGVYYLISTASLAQPVXXPAASA

SEQ ID NO: 7026 - protein, 15 aa, Artificial Sequence
  Cyclic GFR-binding peptide
  MOD_RES (14), (15): Xaa is C or S
KYLISIPSLDQPVXX

SEQ ID NO: 7027 - protein, 23 aa, Artificial Sequence
  Cyclic GFR-binding peptide
  MOD_RES (17), (18): Xaa is C or S
SDDKYLVSIPSLKTPAXXPKPVY

SEQ ID NO: 7028 - protein, 17 aa, Artificial Sequence
  Cyclic GFR-binding peptide
  MOD_RES (16), (16): Xaa is C or S
FYLVSIANLQVQTPRXQ

SEQ ID NO: 7029 - protein, 13 aa, Artificial Sequence
  Cyclic GFR-binding peptide
FYLMSIANLETPV

SEQ ID NO: 7030 - protein, 20 aa, Artificial Sequence
  Cyclic GFR-binding peptide
  MOD_RES (14), (15): Xaa is C or S
KYLISIPSLAQPVXXPAASA

SEQ ID NO: 7031 - protein, 23 aa, Artificial Sequence
  Cyclic GFR-binding peptide
  MOD_RES (17), (18): Xaa is C or S
NEDKYLMSIPSLETPVXXAKPIK

SEQ ID NO: 7032 - protein, 18 aa, Artificial Sequence
  Cyclic GFR-binding peptide
  MOD_RES (14), (15): Xaa is C or S
YYLVSTASLQTPAXXPKP

SEQ ID NO: 7033 - protein, 17 aa, Artificial Sequence
  Cyclic GFR-binding peptide
  MOD_RES (14), (15): Xaa is C or S
YYLVSTASLQTPAXXPK

SEQ ID NO: 7034 - protein, 15 aa, Artificial Sequence
  Cyclic GFR-binding peptide
VKPTRGVYYLISTAS

SEQ ID NO: 7035 - protein, 25 aa, Artificial Sequence
  Cyclic GFR-binding peptide
  MOD_RES (21), (21): Xaa is C or S
KRVIELYLVSIASLQVQTPRXQVNR

SEQ ID NO: 7036 - protein, 22 aa, Artificial Sequence
  Cyclic GFR-binding peptide
  MOD_RES (18), (18): Xaa is C or S
IEYYLVSTASLQVQTPRXQVNR

SEQ ID NO: 7037 - protein, 17 aa, Artificial Sequence
  Cyclic GFR-binding peptide
VVKENEDYYLMSTASLE

SEQ ID NO: 7038 - protein, 16 aa, Artificial Sequence
  Cyclic GFR-binding peptide
  MOD_RES (14), (15): Xaa is C or S
YYLVSTASLKTPVXXA

SEQ ID NO: 7039 - protein, 26 aa, Artificial Sequence
  Cyclic GFR-binding peptide
  MOD_RES (20), (21): Xaa is C or S
KPTRGVKYLISIPSLDQPVXXPSASA

SEQ ID NO: 7040 - protein, 17 aa, Artificial Sequence
  Cyclic GFR-binding peptide
  MOD_RES (14), (15): Xaa is C or S
KYLVSIPSLKTPAXXPK

SEQ ID NO: 7041 - protein, 21 aa, Artificial Sequence
  Cyclic GFR-binding peptide
  MOD_RES (15), (16): Xaa is C or S
DLYLVSIASLKTPVXXAKGVK

SEQ ID NO: 7042 - protein, 17 aa, Artificial Sequence
  Cyclic GFR-binding peptide
  MOD_RES (14), (15): Xaa is C or S
KYLVSIPSLQTPAXXPK

SEQ ID NO: 7043 - protein, 16 aa, Artificial Sequence
  Cyclic GFR-binding peptide
TPVGMDDYYLVSTASL

SEQ ID NO: 7044 - protein, 16 aa, Artificial Sequence
  Cyclic GFR-binding peptide
VKPKRGVFYLISIANL

SEQ ID NO: 7045 - protein, 14 aa, Artificial Sequence
  Cyclic GFR-binding peptide
  MOD_RES (14), (14): Xaa is C or S
YYLISTASLDQPVX

SEQ ID NO: 7046 - protein, 14 aa, Artificial Sequence
  Cyclic GFR-binding peptide
  MOD_RES (14), (14): Xaa is C or S
KYLISIPSLAQPVX

SEQ ID NO: 7047 - protein, 18 aa, Artificial Sequence
  Cyclic GFR-binding peptide
  MOD_RES (16), (16): Xaa is C or S
KYLVSIPSLQVQTPRXQV

SEQ ID NO: 7048 - protein, 29 aa, Artificial Sequence
  Cyclic GFR-binding peptide
  MOD_RES (25), (25): Xaa is C or S
FIPKKRVIEYYLVSTASLQVQTPRXQVNR

SEQ ID NO: 7049 - protein, 21 aa, Artificial Sequence
  Cyclic GFR-binding peptide
  MOD_RES (17), (17): Xaa is C or S
EFYLVSIANLQVQTPRXQVNR

SEQ ID NO: 7050 - protein, 18 aa, Artificial Sequence
  Cyclic GFR-binding peptide
VKPKRGVKYLISIPSLAQ

SEQ ID NO: 7051 - protein, 20 aa, Artificial Sequence
  Cyclic GFR-binding peptide
  MOD_RES (16), (16): Xaa is C or S
KYLVSIPSLQVQTPRXQVNR

SEQ ID NO: 7052 - protein, 18 aa, Artificial Sequence
  Cyclic GFR-binding peptide
  MOD_RES (14), (14): Xaa is C or S
KYLVSIPSLKTPAXTPKT

SEQ ID NO: 7053 - protein, 23 aa, Artificial Sequence
  Cyclic GFR-binding peptide
  MOD_RES (17), (18): Xaa is C or S
RGVFYLISIANLAQPVXXPAASA

SEQ ID NO: 7054 - protein, 18 aa, Artificial Sequence
  Cyclic GFR-binding peptide
  MOD_RES (14), (15): Xaa is C or S
KYLVSIPSLKTPAXXPKP

SEQ ID NO: 7055 - protein, 26 aa, Artificial Sequence
  Cyclic GFR-binding peptide
  MOD_RES (20), (21): Xaa is C or S
VNNSSDFYLVSIANLKTPAXXAKPVA

SEQ ID NO: 7056 - protein, 21 aa, Artificial Sequence
  Cyclic GFR-binding peptide
  MOD_RES (15), (15): Xaa is C or S
DLYLVSIASLKTPAXTPKTVH

SEQ ID NO: 7057 - protein, 15 aa, Artificial Sequence
  Cyclic GFR-binding peptide
VVKENEDFYLMSIAN

SEQ ID NO: 7058 - protein, 13 aa, Artificial Sequence
  Cyclic GFR-binding peptide
KYLVSIPSLKTPA

SEQ ID NO: 7059 - protein, 18 aa, Artificial Sequence
  Cyclic GFR-binding peptide
TPVGMDDFYLVSIANLKT

SEQ ID NO: 7060 - protein, 18 aa, Artificial Sequence
  Cyclic GFR-binding peptide
FIPKKRVIELYLVSIASL

SEQ ID NO: 7061 - protein, 26 aa, Artificial Sequence
  Cyclic GFR-binding peptide
  MOD_RES (20), (21): Xaa is C or S
PVGMDDYYLVSTASLKTPVXXAKGVK

SEQ ID NO: 7062 - protein, 13 aa, Artificial Sequence
  Cyclic GFR-binding peptide
YYLVSTASLQTPA

SEQ ID NO: 7063 - protein, 23 aa, Artificial Sequence
  Cyclic GFR-binding peptide
  MOD_RES (17), (18): Xaa is C or S
MDDFYLVSIANLKTPVXXAKGVK

SEQ ID NO: 7064 - protein, 27 aa, Artificial Sequence
  Cyclic GFR-binding peptide
  MOD_RES (21), (21): Xaa is C or S
IVNSSDDYYLVSTASLKTPAXTPKTVH

SEQ ID NO: 7065 - protein, 17 aa, Artificial Sequence
  Cyclic GFR-binding peptide
IVNNSSDKYLVSIPSLK

SEQ ID NO: 7066 - protein, 24 aa, Artificial Sequence
  Cyclic GFR-binding peptide
  MOD_RES (18), (19): Xaa is C or S
KRGVFYLISIANLAQPVXXPAASA

SEQ ID NO: 7067 - protein, 22 aa, Artificial Sequence
  Cyclic GFR-binding peptide
  MOD_RES (6), (7): Xaa is C or S
SIPKAXXVPTELSPISMLYKDE

SEQ ID NO: 7068 - protein, 15 aa, Artificial Sequence
  Cyclic GFR-binding peptide
NAISILYFIGKTPKI

SEQ ID NO: 7069 - protein, 13 aa, Artificial Sequence
  Cyclic GFR-binding peptide
APTQLSAISVLYL

SEQ ID NO: 7070 - protein, 26 aa, Artificial Sequence
  Cyclic GFR-binding peptide
  MOD_RES (5), (5): Xaa is C or S
RNVQXRPTQVQLSPISVLYKEIVRKK

SEQ ID NO: 7071 - protein, 21 aa, Artificial Sequence
  Cyclic GFR-binding peptide
QVQLNAISVLYFEIVRKKPIF

SEQ ID NO: 7072 - protein, 15 aa, Artificial Sequence
  Cyclic GFR-binding peptide
SPISVLYKDDSSNVI

SEQ ID NO: 7073 - protein, 17 aa, Artificial Sequence
  Cyclic GFR-binding peptide
KLSAISVLYLDDSSNVI

SEQ ID NO: 7074 - protein, 19 aa, Artificial Sequence
  Cyclic GFR-binding peptide
  MOD_RES (5), (6): Xaa is C or S
SASPXXVSQDLSAISILYL

SEQ ID NO: 7075 - protein, 18 aa, Artificial Sequence
  Cyclic GFR-binding peptide
LNAISVLYFEIVRKKPIF

SEQ ID NO: 7076 - protein, 24 aa, Artificial Sequence
  Cyclic GFR-binding peptide
  MOD_RES (6), (7): Xaa is C or S
TVPKPXXAPTQLSATSVLYYDDSS

SEQ ID NO: 7077 - protein, 21 aa, Artificial Sequence
  Cyclic GFR-binding peptide
  MOD_RES (7), (7): Xaa is C or S
HVTKPTXAPTKLSPISVLYKD

SEQ ID NO: 7078 - protein, 21 aa, Artificial Sequence
  Cyclic GFR-binding peptide
  MOD_RES (6), (7): Xaa is C or S
SIPKAXXVPTELNAISMLYFD

SEQ ID NO: 7079 - protein, 17 aa, Artificial Sequence
  Cyclic GFR-binding peptide
DLSPISILYKVGRTPKV

SEQ ID NO: 7080 - protein, 23 aa, Artificial Sequence
  Cyclic GFR-binding peptide
  MOD_RES (6), (7): Xaa is C or S
SIPKAXXVPTELSPISMLYKDEY

SEQ ID NO: 7081 - protein, 13 aa, Artificial Sequence
  Cyclic GFR-binding peptide
VPQALSAISILYL

SEQ ID NO: 7082 - protein, 22 aa, Artificial Sequence
  Cyclic GFR-binding peptide
  MOD_RES (6), (7): Xaa is C or S
TVPKPXXAPTQLSATSVLYYDD

SEQ ID NO: 7083 - protein, 16 aa, Artificial Sequence
  Cyclic GFR-binding peptide
  MOD_RES (2), (3): Xaa is C or S
PXXAPTQLSATSVLYY

SEQ ID NO: 7084 - protein, 15 aa, Artificial Sequence
  Cyclic GFR-binding peptide
SAISILYLIGKTPKI

SEQ ID NO: 7085 - protein, 26 aa, Artificial Sequence
  Cyclic GFR-binding peptide
  MOD_RES (6), (7): Xaa is C or S
ASASPXXVPQDLNAISILYFVGRTPK

SEQ ID NO: 7086 - protein, 16 aa, Artificial Sequence
  Cyclic GFR-binding peptide
  MOD_RES (2), (3): Xaa is C or S
PXXVPQALSATSILYY

SEQ ID NO: 7087 - protein, 23 aa, Artificial Sequence
  Cyclic GFR-binding peptide
  MOD_RES (6), (7): Xaa is C or S
ASAAPXXVPQALSAISILYLVGR

SEQ ID NO: 7088 - protein, 24 aa, Artificial Sequence
  Cyclic GFR-binding peptide
  MOD_RES (6), (7): Xaa is C or S
ASASPXXVPQDLSAISILYLVGRT

SEQ ID NO: 7089 - protein, 26 aa, Artificial Sequence
  Cyclic GFR-binding peptide
  MOD_RES (6), (7): Xaa is C or S
ASAAPXXVPQALSAISILYLVGRKPK

SEQ ID NO: 7090 - protein, 22 aa, Artificial Sequence
  Cyclic GFR-binding peptide
  MOD_RES (6), (7): Xaa is C or S
AVPKAXXAPTKLSPISVLYKDS

SEQ ID NO: 7091 - protein, 18 aa, Artificial Sequence
  Cyclic GFR-binding peptide
  MOD_RES (4), (5): Xaa is C or S
ASPXXVPQDLSATSILYY

SEQ ID NO: 7092 - protein, 18 aa, Artificial Sequence
  Cyclic GFR-binding peptide
  MOD_RES (4), (5): Xaa is C or S
AAPXXVPQALSATSILYY

SEQ ID NO: 7093 - protein, 18 aa, Artificial Sequence
  Cyclic GFR-binding peptide
  MOD_RES (4), (5): Xaa is C or S
PKAXXAPTKLNAISVLYF

SEQ ID NO: 7094 - protein, 26 aa, Artificial Sequence
  Cyclic GFR-binding peptide
  MOD_RES (6), (7): Xaa is C or S
AVPKAXXAPTKLSPISVLYKDSSNNV

SEQ ID NO: 7095 - protein, 18 aa, Artificial Sequence
  Cyclic GFR-binding peptide
TELSATSMLYYDENEKVV

SEQ ID NO: 7096 - protein, 24 aa, Artificial Sequence
  Cyclic GFR-binding peptide
  MOD_RES (6), (7): Xaa is C or S
KIPKAXXVPTELSPISMLYKDENE

SEQ ID NO: 7097 - protein, 25 aa, Artificial Sequence
  Cyclic GFR-binding peptide
  MOD_RES (6), (7): Xaa is C or S
ASASPXXVPQDLNAISILYFVGRTP

SEQ ID NO: 7098 - protein, 17 aa, Artificial Sequence
  Cyclic GFR-binding peptide
  MOD_RES (2), (2): Xaa is C or S
QXRPTQVQLSPISVLYK

SEQ ID NO: 7099 - protein, 21 aa, Artificial Sequence
  Cyclic GFR-binding peptide
QVQLSAISVLYLEIVRKKPIF

SEQ ID NO: 7100 - protein, 18 aa, Artificial Sequence
  Cyclic GFR-binding peptide
  MOD_RES (3), (3): Xaa is C or S
VQXRPTQVQLSAISVLYL

SEQ ID NO: 7101 - protein, 17 aa, Artificial Sequence
  Cyclic GFR-binding peptide
QLSAISVLYLDDSSNVI

SEQ ID NO: 7102 - protein, 21 aa, Artificial Sequence
  Cyclic GFR-binding peptide
  MOD_RES (6), (7): Xaa is C or S
AVPKAXXAPTKLSAISVLYLD

SEQ ID NO: 7103 - protein, 24 aa, Artificial Sequence
  Cyclic GFR-binding peptide
  MOD_RES (6), (7): Xaa is C or S
ASAAPXXVPQALSATSILYYVGRK

SEQ ID NO: 7104 - protein, 25 aa, Artificial Sequence
  Cyclic GFR-binding peptide
  MOD_RES (6), (7): Xaa is C or S
ASASPXXVSQDLSATSILYYIGKTP

SEQ ID NO: 7105 - protein, 22 aa, Artificial Sequence
  Cyclic GFR-binding peptide
  MOD_RES (6), (7): Xaa is C or S
ASASPXXVSQDLSPISILYKIG

SEQ ID NO: 7106 - protein, 25 aa, Artificial Sequence
  Cyclic GFR-binding peptide
  MOD_RES (6), (7): Xaa is C or S
AVPKAXXAPTKLSAISVLYLDSSNN

SEQ ID NO: 7107 - protein, 17 aa, Artificial Sequence
  Cyclic GFR-binding peptide
  MOD_RES (2), (2): Xaa is C or S
QXRPTQVQLSAISVLYL

SEQ ID NO: 7108 - protein, 15 aa, Artificial Sequence
  Cyclic GFR-binding peptide
NAISILYFVGRKPKV

SEQ ID NO: 7109 - protein, 23 aa, Artificial Sequence
  Cyclic GFR-binding peptide
  MOD_RES (6), (7): Xaa is C or S
ASASPXXVPQDLSATSILYYVGR

SEQ ID NO: 7110 - protein, 16 aa, Artificial Sequence
  Cyclic GFR-binding peptide
LSAISVLYLDDSSNVI

SEQ ID NO: 7111 - protein, 23 aa, Artificial Sequence
  Cyclic GFR-binding peptide
  MOD_RES (5), (5): Xaa is C or S
RNVQXRPTQVQLSAISVLYLEIV

SEQ ID NO: 7112 - protein, 13 aa, Artificial Sequence
  Cyclic GFR-binding peptide
VSQDLSAISILYL

SEQ ID NO: 7113 - protein, 21 aa, Artificial Sequence
  Cyclic GFR-binding peptide
  MOD_RES (6), (7): Xaa is C or S
KIPKAXXVPTELNAISMLYFD

SEQ ID NO: 7114 - protein, 29 aa, Artificial Sequence
  Cyclic GFR-binding peptide
  MOD_RES (5), (5): Xaa is C or S
RNVQXRPTQVQLSAISVLYLEIVRKKPIF

SEQ ID NO: 7115 - protein, 16 aa, Artificial Sequence
  Cyclic GFR-binding peptide
LSATSILYYIGKTPKI

SEQ ID NO: 7116 - protein, 20 aa, Artificial Sequence
  Cyclic GFR-binding peptide
  MOD_RES (6), (7): Xaa is C or S
AVPKAXXAPTKLNAISVLYF

SEQ ID NO: 7117 - protein, 22 aa, Artificial Sequence
  Cyclic GFR-binding peptide
  MOD_RES (6), (7): Xaa is C or S
TVPKPXXAPTQLSAISVLYLDD

SEQ ID NO: 7118 - protein, 15 aa, Artificial Sequence
  Cyclic GFR-binding peptide
  MOD_RES (1), (2): Xaa is C or S
XXVPQALSAISILYL

SEQ ID NO: 7119 - protein, 15 aa, Artificial Sequence
  Cyclic GFR-binding peptide
SATSILYYVGRKPKV

SEQ ID NO: 7120 - protein, 24 aa, Artificial Sequence
  Cyclic GFR-binding peptide
  MOD_RES (6), (7): Xaa is C or S
KVGKAXXVPTKLSAISVLYLDDMG

SEQ ID NO: 7121 - protein, 27 aa, Artificial Sequence
  Cyclic GFR-binding peptide
  MOD_RES (6), (7): Xaa is C or S
ASAAPXXVPQALSAISILYLVGRKPKV

SEQ ID NO: 7122 - protein, 15 aa, Artificial Sequence
  Cyclic GFR-binding peptide
SATSILYYIGKTPKI

SEQ ID NO: 7123 - protein, 22 aa, Artificial Sequence
  Cyclic GFR-binding peptide
  MOD_RES (5), (5): Xaa is C or S
RNVQXRPTQVQLSAISVLYLEI

SEQ ID NO: 7124 - protein, 15 aa, Artificial Sequence
  Cyclic GFR-binding peptide
  MOD_RES (2), (2): Xaa is C or S
TXAPTKLSATSVLYY

SEQ ID NO: 7125 - protein, 22 aa, Artificial Sequence
  Cyclic GFR-binding peptide
  MOD_RES (7), (7): Xaa is C or S
HVTKPTXAPTKLSPISVLYKDD

SEQ ID NO: 7126 - protein, 25 aa, Artificial Sequence
  Cyclic GFR-binding peptide
  MOD_RES (6), (7): Xaa is C or S
KVGKAXXVPTKLSAISVLYLDDMGV

SEQ ID NO: 7127 - protein, 29 aa, Artificial Sequence
  Cyclic GFR-binding peptide
  MOD_RES (5), (5): Xaa is C or S
RNVQXRPTQVQLNAISVLYFEIVRKKPIF

SEQ ID NO: 7128 - protein, 27 aa, Artificial Sequence
  Cyclic GFR-binding peptide
  MOD_RES (6), (7): Xaa is C or S
SIPKAXXVPTELSPISMLYKDEYDKVV

SEQ ID NO: 7129 - protein, 27 aa, Artificial Sequence
  Cyclic GFR-binding peptide
  MOD_RES (6), (7): Xaa is C or S
AVPKAXXAPTKLNAISVLYFDSSNNVI

SEQ ID NO: 7130 - protein, 20 aa, Artificial Sequence
  Cyclic GFR-binding peptide
  MOD_RES (6), (7): Xaa is C or S
SIPKAXXVPTELSATSMLYY

SEQ ID NO: 7131 - protein, 17 aa, Artificial Sequence
  Cyclic GFR-binding peptide
DLNAISILYFVGRTPKV

SEQ ID NO: 7132 - protein, 17 aa, Artificial Sequence
  Cyclic GFR-binding peptide
  MOD_RES (3), (4): Xaa is C or S
KAXXVPTELNAISMLYF

SEQ ID NO: 7133 - protein, 17 aa, Artificial Sequence
  Cyclic GFR-binding peptide
QLSPISVLYKDDSSNVI

SEQ ID NO: 7134 - protein, 20 aa, Artificial Sequence
  Cyclic GFR-binding peptide
  MOD_RES (6), (7): Xaa is C or S
TVPKPXXAPTQLSAISVLYL

SEQ ID NO: 7135 - protein, 19 aa, Artificial Sequence
  Cyclic GFR-binding peptide
  MOD_RES (5), (6): Xaa is C or S
VPKPXXAPTQLSAISVLYL

SEQ ID NO: 7136 - protein, 17 aa, Artificial Sequence
  Cyclic GFR-binding peptide
KLSPISVLYKDDSSNVI

SEQ ID NO: 7137 - protein, 17 aa, Artificial Sequence
  Cyclic GFR-binding peptide
  MOD_RES (3), (4): Xaa is C or S
KAXXVPTELSPISMLYK

SEQ ID NO: 7138 - protein, 14 aa, Artificial Sequence
  Cyclic GFR-binding peptide
  MOD_RES (1), (1): Xaa is C or S
XVPQALSAISILYL

SEQ ID NO: 7139 - protein, 20 aa, Artificial Sequence
  Cyclic GFR-binding peptide
  MOD_RES (6), (7): Xaa is C or S
TVPKPXXAPTQLSPISVLYK

SEQ ID NO: 7140 - protein, 27 aa, Artificial Sequence
  Cyclic GFR-binding peptide
  MOD_RES (6), (7): Xaa is C or S
AVPKAXXAPTKLSAISVLYLDSSNNVI

SEQ ID NO: 7141 - protein, 21 aa, Artificial Sequence
  Cyclic GFR-binding peptide
  MOD_RES (6), (7): Xaa is C or S
ASASPXXVPQDLSATSILYYV

SEQ ID NO: 7142 - protein, 25 aa, Artificial Sequence
  Cyclic GFR-binding peptide
  MOD_RES (6), (7): Xaa is C or S
KIPKAXXVPTELSPISMLYKDENEK

SEQ ID NO: 7143 - protein, 27 aa, Artificial Sequence
  Cyclic GFR-binding peptide
  MOD_RES (6), (7): Xaa is C or S
TVPKPXXAPTQLSATSVLYYDDSSNVI

SEQ ID NO: 7144 - protein, 16 aa, Artificial Sequence
  Cyclic GFR-binding peptide
  MOD_RES (1), (1): Xaa is C or S
XRPTQVQLSAISVLYL

SEQ ID NO: 7145 - protein, 19 aa, Artificial Sequence
  Cyclic GFR-binding peptide
  MOD_RES (5), (6): Xaa is C or S
VPKAXXAPTKLSAISVLYL

SEQ ID NO: 7146 - protein, 16 aa, Artificial Sequence
  Cyclic GFR-binding peptide
LSATSILYYVGRKPKV

SEQ ID NO: 7147 - protein, 20 aa, Artificial Sequence
  Cyclic GFR-binding peptide
  MOD_RES (6), (7): Xaa is C or S
AVPKAXXAPTKLSPISVLYK

SEQ ID NO: 7148 - protein, 27 aa, Artificial Sequence
  Cyclic GFR-binding peptide
  MOD_RES (6), (7): Xaa is C or S
SIPKAXXVPTELNAISMLYFDEYDKVV

SEQ ID NO: 7149 - protein, 20 aa, Artificial Sequence
  Cyclic GFR-binding peptide
  MOD_RES (5), (5): Xaa is C or S
RNVQXRPTQVQLNAISVLYF

SEQ ID NO: 7150 - protein, 19 aa, Artificial Sequence
  Cyclic GFR-binding peptide
PQDLSPISILYKVGRTPKV

SEQ ID NO: 7151 - protein, 23 aa, Artificial Sequence
  Cyclic GFR-binding peptide
  MOD_RES (5), (5): Xaa is C or S
RNVQXRPTQVQLNAISVLYFEIV

SEQ ID NO: 7152 - protein, 19 aa, Artificial Sequence
  Cyclic GFR-binding peptide
  MOD_RES (5), (6): Xaa is C or S
SASPXXVPQDLSAISILYL

SEQ ID NO: 7153 - protein, 26 aa, Artificial Sequence
  Cyclic GFR-binding peptide
  MOD_RES (6), (7): Xaa is C or S
ASAAPXXVPQALSATSILYYVGRKPK

SEQ ID NO: 7154 - protein, 28 aa, Artificial Sequence
  Cyclic GFR-binding peptide
  MOD_RES (5), (5): Xaa is C or S
RNVQXRPTQVQLSAISVLYLEIVRKKPI

SEQ ID NO: 7155 - protein, 16 aa, Artificial Sequence
  Cyclic GFR-binding peptide
LSAISILYLIGKTPKI

SEQ ID NO: 7156 - protein, 24 aa, Artificial Sequence
  Cyclic GFR-binding peptide
  MOD_RES (6), (7): Xaa is C or S
KVGKAXXVPTKLNAISVLYFDDMG

SEQ ID NO: 7157 - protein, 26 aa, Artificial Sequence
  Cyclic GFR-binding peptide
  MOD_RES (6), (7): Xaa is C or S
ASAAPXXVPQALSPISILYKVGRKPK

SEQ ID NO: 7158 - protein, 25 aa, Artificial Sequence
  Cyclic GFR-binding peptide
  MOD_RES (5), (5): Xaa is C or S
RNVQXRPTQVQLSATSVLYYEIVRK

SEQ ID NO: 7159 - protein, 19 aa, Artificial Sequence
  Cyclic GFR-binding peptide
  MOD_RES (5), (6): Xaa is C or S
SASPXXVSQDLSPISILYK

SEQ ID NO: 7160 - protein, 17 aa, Artificial Sequence
  Cyclic GFR-binding peptide
  MOD_RES (4), (4): Xaa is C or S
KPTXAPTKLSAISVLYL

SEQ ID NO: 7161 - protein, 27 aa, Artificial Sequence
  Cyclic GFR-binding peptide
  MOD_RES (6), (7): Xaa is C or S
KIPKAXXVPTELSPISMLYKDENEKVV

SEQ ID NO: 7162 - protein, 19 aa, Artificial Sequence
  Cyclic GFR-binding peptide
PTKLSPISVLYKDDSSNVI

SEQ ID NO: 7163 - protein, 17 aa, Artificial Sequence
  Cyclic GFR-binding peptide
ALSPISILYKVGRKPKV

SEQ ID NO: 7164 - protein, 20 aa, Artificial Sequence
  Cyclic GFR-binding peptide
  MOD_RES (6), (7): Xaa is C or S
KIPKAXXVPTELNAISMLYF

SEQ ID NO: 7165 - protein, 24 aa, Artificial Sequence
  Cyclic GFR-binding peptide
  MOD_RES (6), (7): Xaa is C or S
ASASPXXVSQDLSATSILYYIGKT

SEQ ID NO: 7166 - protein, 18 aa, Artificial Sequence
  Cyclic GFR-binding peptide
  MOD_RES (3), (3): Xaa is C or S
VQXRPTQVQLNAISVLYF

SEQ ID NO: 7167 - protein, 27 aa, Artificial Sequence
  Cyclic GFR-binding peptide
  MOD_RES (5), (5): Xaa is C or S
RNVQXRPTQVQLNAISVLYFEIVRKKP

SEQ ID NO: 7168 - protein, 22 aa, Artificial Sequence
  Cyclic GFR-binding peptide
  MOD_RES (6), (7): Xaa is C or S
ASAAPXXVPQALSPISILYKVG

SEQ ID NO: 7169 - protein, 17 aa, Artificial Sequence
  Cyclic GFR-binding peptide
  MOD_RES (3), (4): Xaa is C or S
KPXXAPTKLSAISVLYL

SEQ ID NO: 7170 - protein, 21 aa, Artificial Sequence
  Cyclic GFR-binding peptide
  MOD_RES (6), (7): Xaa is C or S
YVPKPXXAPTKLSAISVLYLD

SEQ ID NO: 7171 - protein, 19 aa, Artificial Sequence
  Cyclic GFR-binding peptide
PTQLSPISVLYKDDSSNVI

SEQ ID NO: 7172 - protein, 18 aa, Artificial Sequence
  Cyclic GFR-binding peptide
  MOD_RES (4), (5): Xaa is C or S
PKAXXAPTKLSAISVLYL

SEQ ID NO: 7173 - protein, 22 aa, Artificial Sequence
  Cyclic GFR-binding peptide
  MOD_RES (6), (7): Xaa is C or S
KIPKAXXVPTELSPISMLYKDE

SEQ ID NO: 7174 - protein, 23 aa, Artificial Sequence
  Cyclic GFR-binding peptide
  MOD_RES (6), (7): Xaa is C or S
ASAAPXXVPQALSATSILYYVGR

SEQ ID NO: 7175 - protein, 27 aa, Artificial Sequence
  Cyclic GFR-binding peptide
  MOD_RES (5), (5): Xaa is C or S
RNVQXRPTQVQLSAISVLYLEIVRKKP

SEQ ID NO: 7176 - protein, 27 aa, Artificial Sequence
  Cyclic GFR-binding peptide
  MOD_RES (6), (7): Xaa is C or S
ASAAPXXVPQALSPISILYKVGRKPKV

SEQ ID NO: 7177 - protein, 15 aa, Artificial Sequence
  Cyclic GFR-binding peptide
  MOD_RES (1), (2): Xaa is C or S
XXVPQALNAISILYF

SEQ ID NO: 7178 - protein, 21 aa, Artificial Sequence
  Cyclic GFR-binding peptide
  MOD_RES (6), (7): Xaa is C or S
KIPKAXXVPTELSPISMLYKD

SEQ ID NO: 7179 - protein, 13 aa, Artificial Sequence
  Cyclic GFR-binding peptide
VPQDLSAISILYL

SEQ ID NO: 7180 - protein, 13 aa, Artificial Sequence
  Cyclic GFR-binding peptide
VPQALNAISILYF

SEQ ID NO: 7181 - protein, 19 aa, Artificial Sequence
  Cyclic GFR-binding peptide
PQDLSAISILYLVGRTPKV

SEQ ID NO: 7182 - protein, 24 aa, Artificial Sequence
  Cyclic GFR-binding peptide
  MOD_RES (6), (7): Xaa is C or S
ASASPXXVPQDLSPISILYKVGRT

SEQ ID NO: 7183 - protein, 19 aa, Artificial Sequence
  Cyclic GFR-binding peptide
PQALSPISILYKVGRKPKV

SEQ ID NO: 7184 - protein, 14 aa, Artificial Sequence
  Cyclic GFR-binding peptide
  MOD_RES (1), (1): Xaa is C or S
XVPTELSATSMLYY

SEQ ID NO: 7185 - protein, 26 aa, Artificial Sequence
  Cyclic GFR-binding peptide
  MOD_RES (5), (5): Xaa is C or S
RNVQXRPTQVQLSATSVLYYEIVRKK

SEQ ID NO: 7186 - protein, 17 aa, Artificial Sequence
  Cyclic GFR-binding peptide
ALNAISILYFVGRKPKV

SEQ ID NO: 7187 - protein, 25 aa, Artificial Sequence
  Cyclic GFR-binding peptide
  MOD_RES (7), (7): Xaa is C or S
HVTKPTXAPTKLSAISVLYLDDSSN

SEQ ID NO: 7188 - protein, 16 aa, Artificial Sequence
  Cyclic GFR-binding peptide
  MOD_RES (2), (3): Xaa is C or S
PXXVPQDLSATSILYY

SEQ ID NO: 7189 - protein, 25 aa, Artificial Sequence
  Cyclic GFR-binding peptide
  MOD_RES (6), (7): Xaa is C or S
ASASPXXVPQDLSPISILYKVGRTP

SEQ ID NO: 7190 - protein, 16 aa, Artificial Sequence
  Cyclic GFR-binding peptide
LSATSILYYVGRTPKV

SEQ ID NO: 7191 - protein, 21 aa, Artificial Sequence
  Cyclic GFR-binding peptide
  MOD_RES (6), (7): Xaa is C or S
ASASPXXVPQDLSAISILYLV

SEQ ID NO: 7192 - protein, 18 aa, Artificial Sequence
  Cyclic GFR-binding peptide
TKLSATSVLYYDDMGVPT

SEQ ID NO: 7193 - protein, 18 aa, Artificial Sequence
  Cyclic GFR-binding peptide
  MOD_RES (4), (5): Xaa is C or S
GKAXXVPTKLSATSVLYY

SEQ ID NO: 7194 - protein, 27 aa, Artificial Sequence
  Cyclic GFR-binding peptide
  MOD_RES (6), (7): Xaa is C or S
AVPKAXXAPTKLSPISVLYKDSSNNVI

SEQ ID NO: 7195 - protein, 16 aa, Artificial Sequence
  Cyclic GFR-binding peptide
  MOD_RES (2), (3): Xaa is C or S
PXXVSQDLSATSILYY

SEQ ID NO: 7196 - protein, 25 aa, Artificial Sequence
  Cyclic GFR-binding peptide
  MOD_RES (6), (7): Xaa is C or S
KIPKAXXVPTELNAISMLYFDENEK

SEQ ID NO: 7197 - protein, 20 aa, Artificial Sequence
  Cyclic GFR-binding peptide
  MOD_RES (6), (7): Xaa is C or S
ASASPXXVPQDLSPISILYK

SEQ ID NO: 7198 - protein, 24 aa, Artificial Sequence
  Cyclic GFR-binding peptide
  MOD_RES (6), (7): Xaa is C or S
SIPKAXXVPTELSATSMLYYDEYD

SEQ ID NO: 7199 - protein, 24 aa, Artificial Sequence
  Cyclic GFR-binding peptide
  MOD_RES (7), (7): Xaa is C or S
HVTKPTXAPTKLSPISVLYKDDSS

SEQ ID NO: 7200 - protein, 19 aa, Artificial Sequence
  Cyclic GFR-binding peptide
  MOD_RES (5), (6): Xaa is C or S
VGKAXXVPTKLNAISVLYF

SEQ ID NO: 7201 - protein, 26 aa, Artificial Sequence
  Cyclic GFR-binding peptide
  MOD_RES (5), (5): Xaa is C or S
RNVQXRPTQVQLNAISVLYFEIVRKK

SEQ ID NO: 7202 - protein, 26 aa, Artificial Sequence
  Cyclic GFR-binding peptide
  MOD_RES (6), (7): Xaa is C or S
KVGKAXXVPTKLSAISVLYLDDMGVP

SEQ ID NO: 7203 - protein, 26 aa, Artificial Sequence
  Cyclic GFR-binding peptide
  MOD_RES (6), (7): Xaa is C or S
AVPKAXXAPTKLSAISVLYLDSSNNV

SEQ ID NO: 7204 - protein, 21 aa, Artificial Sequence
  Cyclic GFR-binding peptide
  MOD_RES (6), (7): Xaa is C or S
ASAAPXXVPQALSPISILYKV

SEQ ID NO: 7205 - protein, 18 aa, Artificial Sequence
  Cyclic GFR-binding peptide
  MOD_RES (4), (5): Xaa is C or S
PKPXXAPTQLSAISVLYL

SEQ ID NO: 7206 - protein, 15 aa, Artificial Sequence
  Cyclic GFR-binding peptide
  MOD_RES (1), (2): Xaa is C or S
XXAPTQLSAISVLYL

SEQ ID NO: 7207 - protein, 20 aa, Artificial Sequence
  Cyclic GFR-binding peptide
  MOD_RES (6), (7): Xaa is C or S
ASAAPXXVPQALNAISILYF

SEQ ID NO: 7208 - protein, 13 aa, Artificial Sequence
  Cyclic GFR-binding peptide
TQVQLSAISVLYL

SEQ ID NO: 7209 - protein, 19 aa, Artificial Sequence
  Cyclic GFR-binding peptide
  MOD_RES (6), (6): Xaa is C or S
VTKPTXAPTKLSAISVLYL

SEQ ID NO: 7210 - protein, 20 aa, Artificial Sequence
  Cyclic GFR-binding peptide
  MOD_RES (6), (7): Xaa is C or S
ASAAPXXVPQALSAISILYL

SEQ ID NO: 7211 - protein, 13 aa, Artificial Sequence
  Cyclic GFR-binding peptide
TQVQLNAISVLYF

SEQ ID NO: 7212 - protein, 25 aa, Artificial Sequence
  Cyclic GFR-binding peptide
  MOD_RES (6), (7): Xaa is C or S
YVPKPXXAPTKLSATSVLYYDDSSN

SEQ ID NO: 7213 - protein, 24 aa, Artificial Sequence
  Cyclic GFR-binding peptide
  MOD_RES (6), (7): Xaa is C or S
AVPKAXXAPTKLSAISVLYLDSSN

SEQ ID NO: 7214 - protein, 15 aa, Artificial Sequence
  Cyclic GFR-binding peptide
NAISILYFVGRTPKV

SEQ ID NO: 7215 - protein, 15 aa, Artificial Sequence
  Cyclic GFR-binding peptide
SAISVLYLDDSSNVI

SEQ ID NO: 7216 - protein, 21 aa, Artificial Sequence
  Cyclic GFR-binding peptide
  MOD_RES (6), (7): Xaa is C or S
TVPKPXXAPTQLSAISVLYLD

SEQ ID NO: 7217 - protein, 17 aa, Artificial Sequence
  Cyclic GFR-binding peptide
DLSAISILYLVGRTPKV

SEQ ID NO: 7218 - protein, 19 aa, Artificial Sequence
  Cyclic GFR-binding peptide
SQDLSATSILYYIGKTPKI

SEQ ID NO: 7219 - protein, 27 aa, Artificial Sequence
  Cyclic GFR-binding peptide
  MOD_RES (6), (7): Xaa is C or S
ASAAPXXVPQALNAISILYFVGRKPKV

SEQ ID NO: 7220 - protein, 25 aa, Artificial Sequence
  Cyclic GFR-binding peptide
  MOD_RES (6), (7): Xaa is C or S
TVPKPXXAPTQLSAISVLYLDDSSN

SEQ ID NO: 7221 - protein, 27 aa, Artificial Sequence
  Cyclic GFR-binding peptide
  MOD_RES (5), (5): Xaa is C or S
RNVQXRPTQVQLSPISVLYKEIVRKKP

SEQ ID NO: 7222 - protein, 26 aa, Artificial Sequence
  Cyclic GFR-binding peptide
  MOD_RES (6), (7): Xaa is C or S
ASASPXXVSQDLSATSILYYIGKTPK

SEQ ID NO: 7223 - protein, 18 aa, Artificial Sequence
  Cyclic GFR-binding peptide
  MOD_RES (5), (5): Xaa is C or S
TKPTXAPTKLSAISVLYL

SEQ ID NO: 7224 - protein, 20 aa, Artificial Sequence
  Cyclic GFR-binding peptide
  MOD_RES (5), (5): Xaa is C or S
RNVQXRPTQVQLSAISVLYL

SEQ ID NO: 7225 - protein, 23 aa, Artificial Sequence
  Cyclic GFR-binding peptide
  MOD_RES (6), (7): Xaa is C or S
AVPKAXXAPTKLSPISVLYKDSS

SEQ ID NO: 7226 - protein, 15 aa, Artificial Sequence
  Cyclic GFR-binding peptide
RPTQVQLSAISVLYL

SEQ ID NO: 7227 - protein, 21 aa, Artificial Sequence
  Cyclic GFR-binding peptide
  MOD_RES (6), (7): Xaa is C or S
ASAAPXXVPQALNAISILYFV

SEQ ID NO: 7228 - protein, 26 aa, Artificial Sequence
  Cyclic GFR-binding peptide
  MOD_RES (6), (7): Xaa is C or S
ASASPXXVSQDLNAISILYFIGKTPK

SEQ ID NO: 7229 - protein, 17 aa, Artificial Sequence
  Cyclic GFR-binding peptide
  MOD_RES (3), (4): Xaa is C or S
KPXXAPTQLSAISVLYL

SEQ ID NO: 7230 - protein, 23 aa, Artificial Sequence
  Cyclic GFR-binding peptide
  MOD_RES (7), (7): Xaa is C or S
HVTKPTXAPTKLSPISVLYKDDS

SEQ ID NO: 7231 - protein, 17 aa, Artificial Sequence
  Cyclic GFR-binding peptide
  MOD_RES (3), (4): Xaa is C or S
KAXXVPTKLSATSVLYY

SEQ ID NO: 7232 - protein, 26 aa, Artificial Sequence
  Cyclic GFR-binding peptide
  MOD_RES (6), (7): Xaa is C or S
YVPKPXXAPTKLSAISVLYLDDSSNV

SEQ ID NO: 7233 - protein, 22 aa, Artificial Sequence
  Cyclic GFR-binding peptide
  MOD_RES (6), (7): Xaa is C or S
YVPKPXXAPTKLSPISVLYKDD

SEQ ID NO: 7234 - protein, 19 aa, Artificial Sequence
  Cyclic GFR-binding peptide
PTELNAISMLYFDENEKVV

SEQ ID NO: 7235 - protein, 27 aa, Artificial Sequence
  Cyclic GFR-binding peptide
  MOD_RES (6), (7): Xaa is C or S
KIPKAXXVPTELNAISMLYFDENEKVV

SEQ ID NO: 7236 - protein, 15 aa, Artificial Sequence
  Cyclic GFR-binding peptide
  MOD_RES (1), (2): Xaa is C or S
XXAPTKLSPISVLYK

SEQ ID NO: 7237 - protein, 23 aa, Artificial Sequence
  Cyclic GFR-binding peptide
  MOD_RES (6), (7): Xaa is C or S
ASASPXXVSQDLSPISILYKIGK

SEQ ID NO: 7238 - protein, 19 aa, Artificial Sequence
  Cyclic GFR-binding peptide
QLSATSVLYYEIVRKKPIF

SEQ ID NO: 7239 - protein, 24 aa, Artificial Sequence
  Cyclic GFR-binding peptide
  MOD_RES (6), (7): Xaa is C or S
TVPKPXXAPTQLSAISVLYLDDSS

SEQ ID NO: 7240 - protein, 25 aa, Artificial Sequence
  Cyclic GFR-binding peptide
  MOD_RES (6), (7): Xaa is C or S
SIPKAXXVPTELNAISMLYFDEYDK

SEQ ID NO: 7241 - protein, 16 aa, Artificial Sequence
  Cyclic GFR-binding peptide
  MOD_RES (2), (3): Xaa is C or S
PXXAPTKLSPISVLYK

SEQ ID NO: 7242 - protein, 23 aa, Artificial Sequence
  Cyclic GFR-binding peptide
  MOD_RES (6), (7): Xaa is C or S
ASASPXXVPQDLNAISILYFVGR

SEQ ID NO: 7243 - protein, 19 aa, Artificial Sequence
  Cyclic GFR-binding peptide
  MOD_RES (5), (6): Xaa is C or S
SAAPXXVPQALSPISILYK

SEQ ID NO: 7244 - protein, 26 aa, Artificial Sequence
  Cyclic GFR-binding peptide
  MOD_RES (7), (7): Xaa is C or S
HVTKPTXAPTKLSAISVLYLDDSSNV

SEQ ID NO: 7245 - protein, 23 aa, Artificial Sequence
  Cyclic GFR-binding peptide
  MOD_RES (6), (7): Xaa is C or S
KIPKAXXVPTELNAISMLYFDEN

SEQ ID NO: 7246 - protein, 19 aa, Artificial Sequence
  Cyclic GFR-binding peptide
  MOD_RES (5), (6): Xaa is C or S
SAAPXXVPQALNAISILYF

SEQ ID NO: 7247 - protein, 13 aa, Artificial Sequence
  Cyclic GFR-binding peptide
VPQDLSPISILYK

SEQ ID NO: 7248 - protein, 19 aa, Artificial Sequence
  Cyclic GFR-binding peptide
  MOD_RES (4), (4): Xaa is C or S
NVQXRPTQVQLSATSVLYY

SEQ ID NO: 7249 - protein, 25 aa, Artificial Sequence
  Cyclic GFR-binding peptide
  MOD_RES (6), (7): Xaa is C or S
SIPKAXXVPTELSATSMLYYDEYDK

SEQ ID NO: 7250 - protein, 14 aa, Artificial Sequence
  Cyclic GFR-binding peptide
  MOD_RES (1), (1): Xaa is C or S
XAPTQLSPISVLYK

SEQ ID NO: 7251 - protein, 15 aa, Artificial Sequence
  Cyclic GFR-binding peptide
SPISILYKVGRTPKV

SEQ ID NO: 7252 - protein, 19 aa, Artificial Sequence
  Cyclic GFR-binding peptide
PQALSAISILYLVGRKPKV

SEQ ID NO: 7253 - protein, 24 aa, Artificial Sequence
  Cyclic GFR-binding peptide
  MOD_RES (6), (7): Xaa is C or S
KIPKAXXVPTELSATSMLYYDENE

SEQ ID NO: 7254 - protein, 23 aa, Artificial Sequence
  Cyclic GFR-binding peptide
  MOD_RES (6), (7): Xaa is C or S
TVPKPXXAPTQLSAISVLYLDDS

SEQ ID NO: 7255 - protein, 22 aa, Artificial Sequence
  Cyclic GFR-binding peptide
  MOD_RES (6), (7): Xaa is C or S
TVPKPXXAPTQLSPISVLYKDD

SEQ ID NO: 7256 - protein, 16 aa, Artificial Sequence
  Cyclic GFR-binding peptide
LNAISMLYFDEYDKVV

SEQ ID NO: 7257 - protein, 18 aa, Artificial Sequence
  Cyclic GFR-binding peptide
TELSPISMLYKDENEKVV

SEQ ID NO: 7258 - protein, 15 aa, Artificial Sequence
  Cyclic GFR-binding peptide
RPTQVQLSATSVLYY

SEQ ID NO: 7259 - protein, 14 aa, Artificial Sequence
  Cyclic GFR-binding peptide
PTQVQLSATSVLYY

SEQ ID NO: 7260 - protein, 19 aa, Artificial Sequence
  Cyclic GFR-binding peptide
PQDLSATSILYYVGRTPKV

SEQ ID NO: 7261 - protein, 17 aa, Artificial Sequence
  Cyclic GFR-binding peptide
  MOD_RES (3), (4): Xaa is C or S
KAXXVPTELSATSMLYY

SEQ ID NO: 7262 - protein, 17 aa, Artificial Sequence
  Cyclic GFR-binding peptide
SAISVLYLEIVRKKPIF

SEQ ID NO: 7263 - protein, 16 aa, Artificial Sequence
  Cyclic GFR-binding peptide
  MOD_RES (1), (1): Xaa is C or S
XRPTQVQLSPISVLYK

SEQ ID NO: 7264 - protein, 27 aa, Artificial Sequence
  Cyclic GFR-binding peptide
  MOD_RES (7), (7): Xaa is C or S
HVTKPTXAPTKLSPISVLYKDDSSNVI

SEQ ID NO: 7265 - protein, 28 aa, Artificial Sequence
  Cyclic GFR-binding peptide
  MOD_RES (5), (5): Xaa is C or S
RNVQXRPTQVQLSATSVLYYEIVRKKPI

SEQ ID NO: 7266 - protein, 25 aa, Artificial Sequence
  Cyclic GFR-binding peptide
  MOD_RES (6), (7): Xaa is C or S
YVPKPXXAPTKLSPISVLYKDDSSN

SEQ ID NO: 7267 - protein, 21 aa, Artificial Sequence
  Cyclic GFR-binding peptide
  MOD_RES (5), (5): Xaa is C or S
RNVQXRPTQVQLSATSVLYYE

SEQ ID NO: 7268 - protein, 18 aa, Artificial Sequence
  Cyclic GFR-binding peptide
QDLSPISILYKVGRTPKV

SEQ ID NO: 7269 - protein, 23 aa, Artificial Sequence
  Cyclic GFR-binding peptide
  MOD_RES (6), (7): Xaa is C or S
YVPKPXXAPTKLSAISVLYLDDS

SEQ ID NO: 7270 - protein, 18 aa, Artificial Sequence
  Cyclic GFR-binding peptide
TKLSAISVLYLDDSSNVI

SEQ ID NO: 7271 - protein, 14 aa, Artificial Sequence
  Cyclic GFR-binding peptide
  MOD_RES (1), (1): Xaa is C or S
XAPTKLSAISVLYL

SEQ ID NO: 7272 - protein, 19 aa, Artificial Sequence
  Cyclic GFR-binding peptide
  MOD_RES (5), (6): Xaa is C or S
VPKPXXAPTKLSAISVLYL

SEQ ID NO: 7273 - protein, 19 aa, Artificial Sequence
  Cyclic GFR-binding peptide
  MOD_RES (5), (6): Xaa is C or S
IPKAXXVPTELNAISMLYF

SEQ ID NO: 7274 - protein, 17 aa, Artificial Sequence
  Cyclic GFR-binding peptide
  MOD_RES (3), (4): Xaa is C or S
SPXXVPQDLSAISILYL

SEQ ID NO: 7275 - protein, 27 aa, Artificial Sequence
  Cyclic GFR-binding peptide
  MOD_RES (5), (5): Xaa is C or S
RNVQXRPTQVQLSATSVLYYEIVRKKP

SEQ ID NO: 7276 - protein, 14 aa, Artificial Sequence
  Cyclic GFR-binding peptide
  MOD_RES (1), (1): Xaa is C or S
XVPTKLSATSVLYY

SEQ ID NO: 7277 - protein, 20 aa, Artificial Sequence
  Cyclic GFR-binding peptide
  MOD_RES (6), (7): Xaa is C or S
SIPKAXXVPTELSPISMLYK

SEQ ID NO: 7278 - protein, 26 aa, Artificial Sequence
  Cyclic GFR-binding peptide
  MOD_RES (6), (7): Xaa is C or S
SIPKAXXVPTELSATSMLYYDEYDKV

SEQ ID NO: 7279 - protein, 20 aa, Artificial Sequence
  Cyclic GFR-binding peptide
  MOD_RES (6), (7): Xaa is C or S
SIPKAXXVPTELNAISMLYF

SEQ ID NO: 7280 - protein, 18 aa, Artificial Sequence
  Cyclic GFR-binding peptide
TQLSAISVLYLDDSSNVI

SEQ ID NO: 7281 - protein, 19 aa, Artificial Sequence
  Cyclic GFR-binding peptide
PTKLSAISVLYLDDMGVPT

SEQ ID NO: 7282 - protein, 15 aa, Artificial Sequence
  Cyclic GFR-binding peptide
  MOD_RES (1), (2): Xaa is C or S
XXVPQDLSAISILYL

SEQ ID NO: 7283 - protein, 19 aa, Artificial Sequence
  Cyclic GFR-binding peptide
  MOD_RES (5), (6): Xaa is C or S
SASPXXVPQDLSPISILYK

SEQ ID NO: 7284 - protein, 17 aa, Artificial Sequence
  Cyclic GFR-binding peptide
  MOD_RES (3), (4): Xaa is C or S
KAXXVPTKLSAISVLYL

SEQ ID NO: 7285 - protein, 19 aa, Artificial Sequence
  Cyclic GFR-binding peptide
SQDLSPISILYKIGKTPKI

SEQ ID NO: 7286 - protein, 18 aa, Artificial Sequence
  Cyclic GFR-binding peptide
QDLNAISILYFVGRTPKV

SEQ ID NO: 7287 - protein, 20 aa, Artificial Sequence
  Cyclic GFR-binding peptide
  MOD_RES (6), (7): Xaa is C or S
YVPKPXXAPTKLSPISVLYK

SEQ ID NO: 7288 - protein, 16 aa, Artificial Sequence
  Cyclic GFR-binding peptide
LNAISVLYFDSSNNVI

SEQ ID NO: 7289 - protein, 26 aa, Artificial Sequence
  Cyclic GFR-binding peptide
  MOD_RES (5), (5): Xaa is C or S
RNVQXRPTQVQLSAISVLYLEIVRKK

SEQ ID NO: 7290 - protein, 22 aa, Artificial Sequence
  Cyclic GFR-binding peptide
  MOD_RES (6), (7): Xaa is C or S
ASASPXXVPQDLSAISILYLVG

SEQ ID NO: 7291 - protein, 16 aa, Artificial Sequence
  Cyclic GFR-binding peptide
  MOD_RES (2), (3): Xaa is C or S
AXXAPTKLNAISVLYF

SEQ ID NO: 7292 - protein, 16 aa, Artificial Sequence
  Cyclic GFR-binding peptide
  MOD_RES (3), (3): Xaa is C or S
PTXAPTKLSATSVLYY

SEQ ID NO: 7293 - protein, 19 aa, Artificial Sequence
  Cyclic GFR-binding peptide
QLSPISVLYKEIVRKKPIF

SEQ ID NO: 7294 - protein, 19 aa, Artificial Sequence
  Cyclic GFR-binding peptide
PQDLNAISILYFVGRTPKV

SEQ ID NO: 7295 - protein, 15 aa, Artificial Sequence
  Cyclic GFR-binding peptide
  MOD_RES (1), (2): Xaa is C or S
XXVPTKLSAISVLYL

SEQ ID NO: 7296 - protein, 21 aa, Artificial Sequence
  Cyclic GFR-binding peptide
  MOD_RES (6), (7): Xaa is C or S
ASAAPXXVPQALSAISILYLV

SEQ ID NO: 7297 - protein, 20 aa, Artificial Sequence
  Cyclic GFR-binding peptide
VQLNAISVLYFEIVRKKPIF

SEQ ID NO: 7298 - protein, 14 aa, Artificial Sequence
  Cyclic GFR-binding peptide
  MOD_RES (1), (1): Xaa is C or S
XVSQDLSAISILYL

SEQ ID NO: 7299 - protein, 15 aa, Artificial Sequence
  Cyclic GFR-binding peptide
  MOD_RES (1), (2): Xaa is C or S
XXVPTKLNAISVLYF

SEQ ID NO: 7300 - protein, 19 aa, Artificial Sequence
  Cyclic GFR-binding peptide
  MOD_RES (5), (6): Xaa is C or S
VGKAXXVPTKLSATSVLYY

SEQ ID NO: 7301 - protein, 22 aa, Artificial Sequence
  Cyclic GFR-binding peptide
  MOD_RES (6), (7): Xaa is C or S
SIPKAXXVPTELSATSMLYYDE

SEQ ID NO: 7302 - protein, 20 aa, Artificial Sequence
  Cyclic GFR-binding peptide
  MOD_RES (6), (7): Xaa is C or S
ASASPXXVPQDLSATSILYY

SEQ ID NO: 7303 - protein, 16 aa, Artificial Sequence
  Cyclic GFR-binding peptide
  MOD_RES (2), (3): Xaa is C or S
PXXVPQDLSAISILYL

SEQ ID NO: 7304 - protein, 15 aa, Artificial Sequence
  Cyclic GFR-binding peptide
  MOD_RES (1), (2): Xaa is C or S
XXVPTKLSATSVLYY

SEQ ID NO: 7305 - protein, 21 aa, Artificial Sequence
  Cyclic GFR-binding peptide
  MOD_RES (6), (7): Xaa is C or S
YVPKPXXAPTKLSATSVLYYD

SEQ ID NO: 7306 - protein, 21 aa, Artificial Sequence
  Cyclic GFR-binding peptide
  MOD_RES (6), (7): Xaa is C or S
TVPKPXXAPTQLSPISVLYKD

SEQ ID NO: 7307 - protein, 19 aa, Artificial Sequence
  Cyclic GFR-binding peptide
  MOD_RES (5), (6): Xaa is C or S
VPKPXXAPTQLSPISVLYK

SEQ ID NO: 7308 - protein, 20 aa, Artificial Sequence
  Cyclic GFR-binding peptide
  MOD_RES (6), (7): Xaa is C or S
ASASPXXVSQDLSAISILYL

SEQ ID NO: 7309 - protein, 18 aa, Artificial Sequence
  Cyclic GFR-binding peptide
  MOD_RES (4), (5): Xaa is C or S
AAPXXVPQALNAISILYF

SEQ ID NO: 7310 - protein, 17 aa, Artificial Sequence
  Cyclic GFR-binding peptide
ALSAISILYLVGRKPKV

SEQ ID NO: 7311 - protein, 16 aa, Artificial Sequence
  Cyclic GFR-binding peptide
  MOD_RES (3), (3): Xaa is C or S
PTXAPTKLSPISVLYK

SEQ ID NO: 7312 - protein, 18 aa, Artificial Sequence
  Cyclic GFR-binding peptide
TQLSPISVLYKDDSSNVI

SEQ ID NO: 7313 - protein, 15 aa, Artificial Sequence
  Cyclic GFR-binding peptide
  MOD_RES (1), (2): Xaa is C or S
XXVSQDLNAISILYF

SEQ ID NO: 7314 - protein, 27 aa, Artificial Sequence
  Cyclic GFR-binding peptide
  MOD_RES (6), (7): Xaa is C or S
KIPKAXXVPTELSATSMLYYDENEKVV

SEQ ID NO: 7315 - protein, 19 aa, Artificial Sequence
  Cyclic GFR-binding peptide
PTELSATSMLYYDENEKVV

SEQ ID NO: 7316 - protein, 15 aa, Artificial Sequence
  Cyclic GFR-binding peptide
SAISILYLVGRTPKV

SEQ ID NO: 7317 - protein, 21 aa, Artificial Sequence
  Cyclic GFR-binding peptide
  MOD_RES (6), (7): Xaa is C or S
SIPKAXXVPTELSPISMLYKD

SEQ ID NO: 7318 - protein, 19 aa, Artificial Sequence
  Cyclic GFR-binding peptide
  MOD_RES (5), (6): Xaa is C or S
VPKPXXAPTKLSPISVLYK

SEQ ID NO: 7319 - protein, 24 aa, Artificial Sequence
  Cyclic GFR-binding peptide
  MOD_RES (6), (7): Xaa is C or S
ASASPXXVSQDLNAISILYFIGKT

SEQ ID NO: 7320 - protein, 25 aa, Artificial Sequence
  Cyclic GFR-binding peptide
  MOD_RES (6), (7): Xaa is C or S
KIPKAXXVPTELSATSMLYYDENEK

SEQ ID NO: 7321 - protein, 20 aa, Artificial Sequence
  Cyclic GFR-binding peptide
VQLSAISVLYLEIVRKKPIF

SEQ ID NO: 7322 - protein, 13 aa, Artificial Sequence
  Cyclic GFR-binding peptide
VPQDLSATSILYY

SEQ ID NO: 7323 - protein, 27 aa, Artificial Sequence
  Cyclic GFR-binding peptide
  MOD_RES (7), (7): Xaa is C or S
HVTKPTXAPTKLSAISVLYLDDSSNVI

SEQ ID NO: 7324 - protein, 20 aa, Artificial Sequence
  Cyclic GFR-binding peptide
  MOD_RES (6), (7): Xaa is C or S
ASASPXXVSQDLNAISILYF

SEQ ID NO: 7325 - protein, 21 aa, Artificial Sequence
  Cyclic GFR-binding peptide
  MOD_RES (6), (7): Xaa is C or S
ASASPXXVSQDLSAISILYLI

SEQ ID NO: 7326 - protein, 17 aa, Artificial Sequence
  Cyclic GFR-binding peptide
DLSATSILYYVGRTPKV

SEQ ID NO: 7327 - protein, 14 aa, Artificial Sequence
  Cyclic GFR-binding peptide
  MOD_RES (1), (1): Xaa is C or S
XAPTQLSAISVLYL

SEQ ID NO: 7328 - protein, 18 aa, Artificial Sequence
  Cyclic GFR-binding peptide
  MOD_RES (4), (5): Xaa is C or S
ASPXXVPQDLNAISILYF

SEQ ID NO: 7329 - protein, 20 aa, Artificial Sequence
  Cyclic GFR-binding peptide
  MOD_RES (6), (7): Xaa is C or S
ASASPXXVSQDLSPISILYK

SEQ ID NO: 7330 - protein, 15 aa, Artificial Sequence
  Cyclic GFR-binding peptide
  MOD_RES (1), (2): Xaa is C or S
XXVPTELSATSMLYY

SEQ ID NO: 7331 - protein, 18 aa, Artificial Sequence
  Cyclic GFR-binding peptide
TKLSPISVLYKDDSSNVI

SEQ ID NO: 7332 - protein, 24 aa, Artificial Sequence
  Cyclic GFR-binding peptide
  MOD_RES (6), (7): Xaa is C or S
ASASPXXVPQDLSATSILYYVGRT

SEQ ID NO: 7333 - protein, 13 aa, Artificial Sequence
  Cyclic GFR-binding peptide
VSQDLSPISILYK

SEQ ID NO: 7334 - protein, 16 aa, Artificial Sequence
  Cyclic GFR-binding peptide
  MOD_RES (2), (3): Xaa is C or S
PXXVPQDLNAISILYF

SEQ ID NO: 7335 - protein, 14 aa, Artificial Sequence
  Cyclic GFR-binding peptide
  MOD_RES (1), (1): Xaa is C or S
XAPTQLSATSVLYY

SEQ ID NO: 7336 - protein, 16 aa, Artificial Sequence
  Cyclic GFR-binding peptide
  MOD_RES (1), (1): Xaa is C or S
XRPTQVQLSATSVLYY

SEQ ID NO: 7337 - protein, 16 aa, Artificial Sequence
  Cyclic GFR-binding peptide
LSPISMLYKDEYDKVV

SEQ ID NO: 7338 - protein, 19 aa, Artificial Sequence
  Cyclic GFR-binding peptide
SQDLSAISILYLIGKTPKI

SEQ ID NO: 7339 - protein, 18 aa, Artificial Sequence
  Cyclic GFR-binding peptide
QDLSPISILYKIGKTPKI

SEQ ID NO: 7340 - protein, 16 aa, Artificial Sequence
  Cyclic GFR-binding peptide
  MOD_RES (2), (3): Xaa is C or S
PXXAPTQLSPISVLYK

SEQ ID NO: 7341 - protein, 15 aa, Artificial Sequence
  Cyclic GFR-binding peptide
NAISVLYFDDMGVPT

SEQ ID NO: 7342 - protein, 18 aa, Artificial Sequence
  Cyclic GFR-binding peptide
TELNAISMLYFDENEKVV

SEQ ID NO: 7343 - protein, 17 aa, Artificial Sequence
  Cyclic GFR-binding peptide
KLSATSVLYYDDMGVPT

SEQ ID NO: 7344 - protein, 19 aa, Artificial Sequence
  Cyclic GFR-binding peptide
SQDLNAISILYFIGKTPKI

SEQ ID NO: 7345 - protein, 20 aa, Artificial Sequence
  Cyclic GFR-binding peptide
  MOD_RES (7), (7): Xaa is C or S
HVTKPTXAPTKLSATSVLYY

SEQ ID NO: 7346 - protein, 14 aa, Artificial Sequence
  Cyclic GFR-binding peptide
PTQVQLSPISVLYK

SEQ ID NO: 7347 - protein, 16 aa, Artificial Sequence
  Cyclic GFR-binding peptide
  MOD_RES (2), (3): Xaa is C or S
PXXVPQALNAISILYF

SEQ ID NO: 7348 - protein, 14 aa, Artificial Sequence
  Cyclic GFR-binding peptide
  MOD_RES (1), (1): Xaa is C or S
XAPTKLSPISVLYK

SEQ ID NO: 7349 - protein, 22 aa, Artificial Sequence
  Cyclic GFR-binding peptide
  MOD_RES (6), (7): Xaa is C or S
ASASPXXVSQDLSATSILYYIG

SEQ ID NO: 7350 - protein, 15 aa, Artificial Sequence
  Cyclic GFR-binding peptide
  MOD_RES (1), (2): Xaa is C or S
XXVSQDLSAISILYL

SEQ ID NO: 7351 - protein, 27 aa, Artificial Sequence
  Cyclic GFR-binding peptide
  MOD_RES (6), (7): Xaa is C or S
ASASPXXVPQDLSATSILYYVGRTPKV

SEQ ID NO: 7352 - protein, 15 aa, Artificial Sequence
  Cyclic GFR-binding peptide
SPISILYKVGRKPKV

SEQ ID NO: 7353 - protein, 26 aa, Artificial Sequence
  Cyclic GFR-binding peptide
  MOD_RES (6), (7): Xaa is C or S
ASASPXXVSQDLSAISILYLIGKTPK

SEQ ID NO: 7354 - protein, 22 aa, Artificial Sequence
  Cyclic GFR-binding peptide
  MOD_RES (6), (7): Xaa is C or S
ASASPXXVPQDLNAISILYFVG

SEQ ID NO: 7355 - protein, 22 aa, Artificial Sequence
  Cyclic GFR-binding peptide
  MOD_RES (7), (7): Xaa is C or S
HVTKPTXAPTKLSATSVLYYDD

SEQ ID NO: 7356 - protein, 23 aa, Artificial Sequence
  Cyclic GFR-binding peptide
  MOD_RES (6), (7): Xaa is C or S
ASASPXXVSQDLSATSILYYIGK

SEQ ID NO: 7357 - protein, 18 aa, Artificial Sequence
  Cyclic GFR-binding peptide
LSATSVLYYEIVRKKPIF

SEQ ID NO: 7358 - protein, 18 aa, Artificial Sequence
  Cyclic GFR-binding peptide
  MOD_RES (4), (5): Xaa is C or S
ASPXXVSQDLSATSILYY

SEQ ID NO: 7359 - protein, 19 aa, Artificial Sequence
  Cyclic GFR-binding peptide
PTKLSPISVLYKDSSNNVI

SEQ ID NO: 7360 - protein, 19 aa, Artificial Sequence
  Cyclic GFR-binding peptide
PTELSPISMLYKDEYDKVV

SEQ ID NO: 7361 - protein, 18 aa, Artificial Sequence
  Cyclic GFR-binding peptide
  MOD_RES (4), (5): Xaa is C or S
PKAXXVPTELSATSMLYY

SEQ ID NO: 7362 - protein, 17 aa, Artificial Sequence
  Cyclic GFR-binding peptide
  MOD_RES (3), (4): Xaa is C or S
KAXXAPTKLSPISVLYK

SEQ ID NO: 7363 - protein, 21 aa, Artificial Sequence
  Cyclic GFR-binding peptide
  MOD_RES (6), (7): Xaa is C or S
KVGKAXXVPTKLSATSVLYYD

SEQ ID NO: 7364 - protein, 13 aa, Artificial Sequence
  Cyclic GFR-binding peptide
VPQALSPISILYK

SEQ ID NO: 7365 - protein, 13 aa, Artificial Sequence
  Cyclic GFR-binding peptide
TQVQLSATSVLYY

SEQ ID NO: 7366 - protein, 15 aa, Artificial Sequence
  Cyclic GFR-binding peptide
  MOD_RES (1), (2): Xaa is C or S
XXAPTQLSPISVLYK

SEQ ID NO: 7367 - protein, 19 aa, Artificial Sequence
  Cyclic GFR-binding peptide
  MOD_RES (5), (6): Xaa is C or S
SAAPXXVPQALSAISILYL

SEQ ID NO: 7368 - protein, 15 aa, Artificial Sequence
  Cyclic GFR-binding peptide
  MOD_RES (1), (2): Xaa is C or S
XXVPTELNAISMLYF

SEQ ID NO: 7369 - protein, 16 aa, Artificial Sequence
  Cyclic GFR-binding peptide
LSATSMLYYDENEKVV

SEQ ID NO: 7370 - protein, 27 aa, Artificial Sequence
  Cyclic GFR-binding peptide
  MOD_RES (6), (7): Xaa is C or S
YVPKPXXAPTKLSATSVLYYDDSSNVI

SEQ ID NO: 7371 - protein, 20 aa, Artificial Sequence
  Cyclic GFR-binding peptide
  MOD_RES (6), (7): Xaa is C or S
ASASPXXVPQDLSAISILYL

SEQ ID NO: 7372 - protein, 19 aa, Artificial Sequence
  Cyclic GFR-binding peptide
  MOD_RES (6), (6): Xaa is C or S
VTKPTXAPTKLSPISVLYK

SEQ ID NO: 7373 - protein, 15 aa, Artificial Sequence
  Cyclic GFR-binding peptide
  MOD_RES (2), (2): Xaa is C or S
TXAPTKLSAISVLYL

SEQ ID NO: 7374 - protein, 26 aa, Artificial Sequence
  Cyclic GFR-binding peptide
  MOD_RES (6), (7): Xaa is C or S
KIPKAXXVPTELNAISMLYFDENEKV

SEQ ID NO: 7375 - protein, 18 aa, Artificial Sequence
  Cyclic GFR-binding peptide
  MOD_RES (4), (5): Xaa is C or S
PKAXXAPTKLSPISVLYK

SEQ ID NO: 7376 - protein, 25 aa, Artificial Sequence
  Cyclic GFR-binding peptide
  MOD_RES (6), (7): Xaa is C or S
TVPKPXXAPTQLSATSVLYYDDSSN

SEQ ID NO: 7377 - protein, 15 aa, Artificial Sequence
  Cyclic GFR-binding peptide
RPTQVQLSPISVLYK

SEQ ID NO: 7378 - protein, 23 aa, Artificial Sequence
  Cyclic GFR-binding peptide
  MOD_RES (6), (7): Xaa is C or S
SIPKAXXVPTELNAISMLYFDEY

SEQ ID NO: 7379 - protein, 19 aa, Artificial Sequence
  Cyclic GFR-binding peptide
  MOD_RES (5), (6): Xaa is C or S
VPKPXXAPTKLSATSVLYY

SEQ ID NO: 7380 - protein, 18 aa, Artificial Sequence
  Cyclic GFR-binding peptide
QDLSAISILYLVGRTPKV

SEQ ID NO: 7381 - protein, 20 aa, Artificial Sequence
  Cyclic GFR-binding peptide
  MOD_RES (6), (7): Xaa is C or S
KIPKAXXVPTELSPISMLYK

SEQ ID NO: 7382 - protein, 26 aa, Artificial Sequence
  Cyclic GFR-binding peptide
  MOD_RES (6), (7): Xaa is C or S
KVGKAXXVPTKLNAISVLYFDDMGVP

SEQ ID NO: 7383 - protein, 16 aa, Artificial Sequence
  Cyclic GFR-binding peptide
LSAISVLYLDSSNNVI

SEQ ID NO: 7384 - protein, 23 aa, Artificial Sequence
  Cyclic GFR-binding peptide
  MOD_RES (5), (5): Xaa is C or S
RNVQXRPTQVQLSPISVLYKEIV

SEQ ID NO: 7385 - protein, 23 aa, Artificial Sequence
  Cyclic GFR-binding peptide
  MOD_RES (6), (7): Xaa is C or S
ASASPXXVPQDLSAISILYLVGR

SEQ ID NO: 7386 - protein, 20 aa, Artificial Sequence
  Cyclic GFR-binding peptide
  MOD_RES (6), (7): Xaa is C or S
ASASPXXVSQDLSATSILYY

SEQ ID NO: 7387 - protein, 15 aa, Artificial Sequence
  Cyclic GFR-binding peptide
SAISILYLVGRKPKV

SEQ ID NO: 7388 - protein, 25 aa, Artificial Sequence
  Cyclic GFR-binding peptide
  MOD_RES (6), (7): Xaa is C or S
TVPKPXXAPTQLSPISVLYKDDSSN

SEQ ID NO: 7389 - protein, 16 aa, Artificial Sequence
  Cyclic GFR-binding peptide
LSATSVLYYDDSSNVI

SEQ ID NO: 7390 - protein, 20 aa, Artificial Sequence
  Cyclic GFR-binding peptide
  MOD_RES (6), (7): Xaa is C or S
KIPKAXXVPTELSATSMLYY

SEQ ID NO: 7391 - protein, 16 aa, Artificial Sequence
  Cyclic GFR-binding peptide
  MOD_RES (2), (3): Xaa is C or S
PXXVSQDLNAISILYF

SEQ ID NO: 7392 - protein, 14 aa, Artificial Sequence
  Cyclic GFR-binding peptide
  MOD_RES (1), (1): Xaa is C or S
XVPTELNAISMLYF

SEQ ID NO: 7393 - protein, 13 aa, Artificial Sequence
  Cyclic GFR-binding peptide
TQVQLSPISVLYK

SEQ ID NO: 7394 - protein, 17 aa, Artificial Sequence
  Cyclic GFR-binding peptide
  MOD_RES (3), (4): Xaa is C or S
SPXXVSQDLSAISILYL

SEQ ID NO: 7395 - protein, 20 aa, Artificial Sequence
  Cyclic GFR-binding peptide
  MOD_RES (6), (7): Xaa is C or S
ASASPXXVPQDLNAISILYF

SEQ ID NO: 7396 - protein, 25 aa, Artificial Sequence
  Cyclic GFR-binding peptide
  MOD_RES (6), (7): Xaa is C or S
SIPKAXXVPTELSPISMLYKDEYDK

SEQ ID NO: 7397 - protein, 14 aa, Artificial Sequence
  Cyclic GFR-binding peptide
  MOD_RES (1), (1): Xaa is C or S
XVPTKLNAISVLYF

SEQ ID NO: 7398 - protein, 16 aa, Artificial Sequence
  Cyclic GFR-binding peptide
LSPISVLYKDSSNNVI

SEQ ID NO: 7399 - protein, 15 aa, Artificial Sequence
  Cyclic GFR-binding peptide
  MOD_RES (1), (2): Xaa is C or S
XXAPTQLSATSVLYY

SEQ ID NO: 7400 - protein, 17 aa, Artificial Sequence
  Cyclic GFR-binding peptide
DLSATSILYYIGKTPKI

SEQ ID NO: 7401 - protein, 14 aa, Artificial Sequence
  Cyclic GFR-binding peptide
  MOD_RES (1), (1): Xaa is C or S
XVPTKLSAISVLYL

SEQ ID NO: 7402 - protein, 19 aa, Artificial Sequence
  Cyclic GFR-binding peptide
PTQLSATSVLYYDDSSNVI

SEQ ID NO: 7403 - protein, 15 aa, Artificial Sequence
  Cyclic GFR-binding peptide
SPISILYKIGKTPKI

SEQ ID NO: 7404 - protein, 19 aa, Artificial Sequence
  Cyclic GFR-binding peptide
PTKLSATSVLYYDDSSNVI

SEQ ID NO: 7405 - protein, 18 aa, Artificial Sequence
  Cyclic GFR-binding peptide
QDLNAISILYFIGKTPKI

SEQ ID NO: 7406 - protein, 20 aa, Artificial Sequence
  Cyclic GFR-binding peptide
  MOD_RES (7), (7): Xaa is C or S
HVTKPTXAPTKLSPISVLYK

SEQ ID NO: 7407 - protein, 24 aa, Artificial Sequence
  Cyclic GFR-binding peptide
  MOD_RES (6), (7): Xaa is C or S
ASASPXXVSQDLSAISILYLIGKT

SEQ ID NO: 7408 - protein, 19 aa, Artificial Sequence
  Cyclic GFR-binding peptide
  MOD_RES (6), (6): Xaa is C or S
VTKPTXAPTKLSATSVLYY

SEQ ID NO: 7409 - protein, 16 aa, Artificial Sequence
  Cyclic GFR-binding peptide
  MOD_RES (2), (3): Xaa is C or S
PXXVSQDLSAISILYL

SEQ ID NO: 7410 - protein, 19 aa, Artificial Sequence
  Cyclic GFR-binding peptide
PTKLSAISVLYLDSSNNVI

SEQ ID NO: 7411 - protein, 24 aa, Artificial Sequence
  Cyclic GFR-binding peptide
  MOD_RES (6), (7): Xaa is C or S
YVPKPXXAPTKLSATSVLYYDDSS

SEQ ID NO: 7412 - protein, 19 aa, Artificial Sequence
  Cyclic GFR-binding peptide
  MOD_RES (4), (4): Xaa is C or S
NVQXRPTQVQLSPISVLYK

SEQ ID NO: 7413 - protein, 22 aa, Artificial Sequence
  Cyclic GFR-binding peptide
  MOD_RES (6), (7): Xaa is C or S
KVGKAXXVPTKLSATSVLYYDD

SEQ ID NO: 7414 - protein, 23 aa, Artificial Sequence
  Cyclic GFR-binding peptide
  MOD_RES (5), (5): Xaa is C or S
RNVQXRPTQVQLSATSVLYYEIV

SEQ ID NO: 7415 - protein, 21 aa, Artificial Sequence
  Cyclic GFR-binding peptide
  MOD_RES (6), (7): Xaa is C or S
ASASPXXVSQDLNAISILYFI

SEQ ID NO: 7416 - protein, 27 aa, Artificial Sequence
  Cyclic GFR-binding peptide
  MOD_RES (6), (7): Xaa is C or S
ASASPXXVSQDLSATSILYYIGKTPKI

SEQ ID NO: 7417 - protein, 17 aa, Artificial Sequence
  Cyclic GFR-binding peptide
  MOD_RES (3), (4): Xaa is C or S
SPXXVSQDLNAISILYF

SEQ ID NO: 7418 - protein, 19 aa, Artificial Sequence
  Cyclic GFR-binding peptide
PTELNAISMLYFDEYDKVV

SEQ ID NO: 7419 - protein, 22 aa, Artificial Sequence
  Cyclic GFR-binding peptide
  MOD_RES (6), (7): Xaa is C or S
SIPKAXXVPTELNAISMLYFDE

SEQ ID NO: 7420 - protein, 18 aa, Artificial Sequence
  Cyclic GFR-binding peptide
  MOD_RES (4), (5): Xaa is C or S
PKAXXVPTELSPISMLYK

SEQ ID NO: 7421 - protein, 27 aa, Artificial Sequence
  Cyclic GFR-binding peptide
  MOD_RES (6), (7): Xaa is C or S
KVGKAXXVPTKLNAISVLYFDDMGVPT

SEQ ID NO: 7422 - protein, 29 aa, Artificial Sequence
  Cyclic GFR-binding peptide
  MOD_RES (5), (5): Xaa is C or S
RNVQXRPTQVQLSPISVLYKEIVRKKPIF

SEQ ID NO: 7423 - protein, 18 aa, Artificial Sequence
  Cyclic GFR-binding peptide
  MOD_RES (4), (5): Xaa is C or S
ASPXXVSQDLSPISILYK

SEQ ID NO: 7424 - protein, 19 aa, Artificial Sequence
  Cyclic GFR-binding peptide
  MOD_RES (5), (6): Xaa is C or S
SASPXXVSQDLSATSILYY

SEQ ID NO: 7425 - protein, 27 aa, Artificial Sequence
  Cyclic GFR-binding peptide
  MOD_RES (6), (7): Xaa is C or S
KVGKAXXVPTKLSAISVLYLDDMGVPT

SEQ ID NO: 7426 - protein, 28 aa, Artificial Sequence
  Cyclic GFR-binding peptide
  MOD_RES (5), (5): Xaa is C or S
RNVQXRPTQVQLSPISVLYKEIVRKKPI

SEQ ID NO: 7427 - protein, 21 aa, Artificial Sequence
  Cyclic GFR-binding peptide
  MOD_RES (6), (7): Xaa is C or S
ASASPXXVSQDLSPISILYKI

SEQ ID NO: 7428 - protein, 18 aa, Artificial Sequence
  Cyclic GFR-binding peptide
QALSATSILYYVGRKPKV

SEQ ID NO: 7429 - protein, 22 aa, Artificial Sequence
  Cyclic GFR-binding peptide
  MOD_RES (6), (7): Xaa is C or S
ASAAPXXVPQALSAISILYLVG

SEQ ID NO: 7430 - protein, 16 aa, Artificial Sequence
  Cyclic GFR-binding peptide
LNAISVLYFDDMGVPT

SEQ ID NO: 7431 - protein, 25 aa, Artificial Sequence
  Cyclic GFR-binding peptide
  MOD_RES (6), (7): Xaa is C or S
YVPKPXXAPTKLSAISVLYLDDSSN

SEQ ID NO: 7432 - protein, 26 aa, Artificial Sequence
  Cyclic GFR-binding peptide
  MOD_RES (6), (7): Xaa is C or S
TVPKPXXAPTQLSATSVLYYDDSSNV

SEQ ID NO: 7433 - protein, 24 aa, Artificial Sequence
  Cyclic GFR-binding peptide
  MOD_RES (6), (7): Xaa is C or S
SIPKAXXVPTELSPISMLYKDEYD

SEQ ID NO: 7434 - protein, 21 aa, Artificial Sequence
  Cyclic GFR-binding peptide
  MOD_RES (6), (7): Xaa is C or S
ASASPXXVPQDLSPISILYKV

SEQ ID NO: 7435 - protein, 17 aa, Artificial Sequence
  Cyclic GFR-binding peptide
ELSPISMLYKDENEKVV

SEQ ID NO: 7436 - protein, 13 aa, Artificial Sequence
  Cyclic GFR-binding peptide
VSQDLSATSILYY

SEQ ID NO: 7437 - protein, 22 aa, Artificial Sequence
  Cyclic GFR-binding peptide
  MOD_RES (6), (7): Xaa is C or S
AVPKAXXAPTKLNAISVLYFDS

SEQ ID NO: 7438 - protein, 22 aa, Artificial Sequence
  Cyclic GFR-binding peptide
  MOD_RES (6), (7): Xaa is C or S
KVGKAXXVPTKLNAISVLYFDD

SEQ ID NO: 7439 - protein, 20 aa, Artificial Sequence
  Cyclic GFR-binding peptide
  MOD_RES (6), (7): Xaa is C or S
TVPKPXXAPTQLSATSVLYY

SEQ ID NO: 7440 - protein, 23 aa, Artificial Sequence
  Cyclic GFR-binding peptide
  MOD_RES (6), (7): Xaa is C or S
KIPKAXXVPTELSATSMLYYDEN

SEQ ID NO: 7441 - protein, 22 aa, Artificial Sequence
  Cyclic GFR-binding peptide
  MOD_RES (6), (7): Xaa is C or S
ASAAPXXVPQALSATSILYYVG

SEQ ID NO: 7442 - protein, 20 aa, Artificial Sequence
  Cyclic GFR-binding peptide
  MOD_RES (5), (5): Xaa is C or S
RNVQXRPTQVQLSATSVLYY

SEQ ID NO: 7443 - protein, 23 aa, Artificial Sequence
  Cyclic GFR-binding peptide
  MOD_RES (6), (7): Xaa is C or S
KVGKAXXVPTKLSAISVLYLDDM

SEQ ID NO: 7444 - protein, 18 aa, Artificial Sequence
  Cyclic GFR-binding peptide
TKLNAISVLYFDSSNNVI

SEQ ID NO: 7445 - protein, 16 aa, Artificial Sequence
  Cyclic GFR-binding peptide
LNAISMLYFDENEKVV

SEQ ID NO: 7446 - protein, 16 aa, Artificial Sequence
  Cyclic GFR-binding peptide
  MOD_RES (2), (3): Xaa is C or S
PXXVPQALSAISILYL

SEQ ID NO: 7447 - protein, 16 aa, Artificial Sequence
  Cyclic GFR-binding peptide
  MOD_RES (2), (3): Xaa is C or S
PXXAPTQLSAISVLYL

SEQ ID NO: 7448 - protein, 23 aa, Artificial Sequence
  Cyclic GFR-binding peptide
  MOD_RES (6), (7): Xaa is C or S
ASAAPXXVPQALSPISILYKVGR

SEQ ID NO: 7449 - protein, 22 aa, Artificial Sequence
  Cyclic GFR-binding peptide
  MOD_RES (7), (7): Xaa is C or S
HVTKPTXAPTKLSAISVLYLDD

SEQ ID NO: 7450 - protein, 18 aa, Artificial Sequence
  Cyclic GFR-binding peptide
TKLSAISVLYLDSSNNVI

SEQ ID NO: 7451 - protein, 15 aa, Artificial Sequence
  Cyclic GFR-binding peptide
SPISMLYKDENEKVV

SEQ ID NO: 7452 - protein, 25 aa, Artificial Sequence
  Cyclic GFR-binding peptide
  MOD_RES (6), (7): Xaa is C or S
ASASPXXVPQDLSATSILYYVGRTP

SEQ ID NO: 7453 - protein, 15 aa, Artificial Sequence
  Cyclic GFR-binding peptide
SATSMLYYDEYDKVV

SEQ ID NO: 7454 - protein, 19 aa, Artificial Sequence
  Cyclic GFR-binding peptide
  MOD_RES (5), (6): Xaa is C or S
VPKPXXAPTQLSATSVLYY

SEQ ID NO: 7455 - protein, 22 aa, Artificial Sequence
  Cyclic GFR-binding peptide
  MOD_RES (6), (7): Xaa is C or S
ASASPXXVSQDLNAISILYFIG

SEQ ID NO: 7456 - protein, 14 aa, Artificial Sequence
  Cyclic GFR-binding peptide
PTQVQLNAISVLYF

SEQ ID NO: 7457 - protein, 26 aa, Artificial Sequence
  Cyclic GFR-binding peptide
  MOD_RES (6), (7): Xaa is C or S
SIPKAXXVPTELNAISMLYFDEYDKV

SEQ ID NO: 7458 - protein, 26 aa, Artificial Sequence
  Cyclic GFR-binding peptide
  MOD_RES (7), (7): Xaa is C or S
HVTKPTXAPTKLSPISVLYKDDSSNV

SEQ ID NO: 7459 - protein, 17 aa, Artificial Sequence
  Cyclic GFR-binding peptide
  MOD_RES (3), (4): Xaa is C or S
SPXXVPQDLNAISILYF

SEQ ID NO: 7460 - protein, 16 aa, Artificial Sequence
  Cyclic GFR-binding peptide
  MOD_RES (2), (3): Xaa is C or S
AXXAPTKLSAISVLYL

SEQ ID NO: 7461 - protein, 18 aa, Artificial Sequence
  Cyclic GFR-binding peptide
  MOD_RES (4), (5): Xaa is C or S
ASPXXVPQDLSAISILYL

SEQ ID NO: 7462 - protein, 22 aa, Artificial Sequence
  Cyclic GFR-binding peptide
  MOD_RES (6), (7): Xaa is C or S
YVPKPXXAPTKLSAISVLYLDD

SEQ ID NO: 7463 - protein, 18 aa, Artificial Sequence
  Cyclic GFR-binding peptide
  MOD_RES (4), (5): Xaa is C or S
GKAXXVPTKLSAISVLYL

SEQ ID NO: 7464 - protein, 23 aa, Artificial Sequence
  Cyclic GFR-binding peptide
  MOD_RES (6), (7): Xaa is C or S
AVPKAXXAPTKLNAISVLYFDSS

SEQ ID NO: 7465 - protein, 21 aa, Artificial Sequence
  Cyclic GFR-binding peptide
  MOD_RES (7), (7): Xaa is C or S
HVTKPTXAPTKLSATSVLYYD

SEQ ID NO: 7466 - protein, 24 aa, Artificial Sequence
  Cyclic GFR-binding peptide
  MOD_RES (6), (7): Xaa is C or S
ASASPXXVSQDLSPISILYKIGKT

SEQ ID NO: 7467 - protein, 27 aa, Artificial Sequence
  Cyclic GFR-binding peptide
  MOD_RES (6), (7): Xaa is C or S
KVGKAXXVPTKLSATSVLYYDDMGVPT

SEQ ID NO: 7468 - protein, 18 aa, Artificial Sequence
  Cyclic GFR-binding peptide
  MOD_RES (3), (3): Xaa is C or S
VQXRPTQVQLSATSVLYY

SEQ ID NO: 7469 - protein, 18 aa, Artificial Sequence
  Cyclic GFR-binding peptide
  MOD_RES (4), (5): Xaa is C or S
PKAXXVPTELNAISMLYF

SEQ ID NO: 7470 - protein, 13 aa, Artificial Sequence
  Cyclic GFR-binding peptide
VPQALSATSILYY

SEQ ID NO: 7471 - protein, 17 aa, Artificial Sequence
  Cyclic GFR-binding peptide
KLSAISVLYLDDMGVPT

SEQ ID NO: 7472 - protein, 18 aa, Artificial Sequence
  Cyclic GFR-binding peptide
TELSPISMLYKDEYDKVV

SEQ ID NO: 7473 - protein, 18 aa, Artificial Sequence
  Cyclic GFR-binding peptide
QDLSAISILYLIGKTPKI

SEQ ID NO: 7474 - protein, 16 aa, Artificial Sequence
  Cyclic GFR-binding peptide
LSAISVLYLDDMGVPT

SEQ ID NO: 7475 - protein, 17 aa, Artificial Sequence
  Cyclic GFR-binding peptide
  MOD_RES (2), (2): Xaa is C or S
QXRPTQVQLSATSVLYY

SEQ ID NO: 7476 - protein, 17 aa, Artificial Sequence
  Cyclic GFR-binding peptide
  MOD_RES (3), (4): Xaa is C or S
APXXVPQALSPISILYK

SEQ ID NO: 7477 - protein, 24 aa, Artificial Sequence
  Cyclic GFR-binding peptide
  MOD_RES (7), (7): Xaa is C or S
HVTKPTXAPTKLSATSVLYYDDSS

SEQ ID NO: 7478 - protein, 25 aa, Artificial Sequence
  Cyclic GFR-binding peptide
  MOD_RES (6), (7): Xaa is C or S
ASASPXXVSQDLNAISILYFIGKTP

SEQ ID NO: 7479 - protein, 18 aa, Artificial Sequence
  Cyclic GFR-binding peptide
  MOD_RES (4), (5): Xaa is C or S
GKAXXVPTKLNAISVLYF

SEQ ID NO: 7480 - protein, 27 aa, Artificial Sequence
  Cyclic GFR-binding peptide
  MOD_RES (6), (7): Xaa is C or S
ASASPXXVSQDLSAISILYLIGKTPKI

SEQ ID NO: 7481 - protein, 17 aa, Artificial Sequence
  Cyclic GFR-binding peptide
SATSVLYYEIVRKKPIF

SEQ ID NO: 7482 - protein, 15 aa, Artificial Sequence
  Cyclic GFR-binding peptide
  MOD_RES (1), (2): Xaa is C or S
XXVPQALSATSILYY

SEQ ID NO: 7483 - protein, 21 aa, Artificial Sequence
  Cyclic GFR-binding peptide
  MOD_RES (6), (7): Xaa is C or S
ASASPXXVPQDLNAISILYFV

SEQ ID NO: 7484 - protein, 17 aa, Artificial Sequence
  Cyclic GFR-binding peptide
  MOD_RES (3), (4): Xaa is C or S
APXXVPQALNAISILYF

SEQ ID NO: 7485 - protein, 18 aa, Artificial Sequence
  Cyclic GFR-binding peptide
  MOD_RES (4), (5): Xaa is C or S
AAPXXVPQALSAISILYL

SEQ ID NO: 7486 - protein, 26 aa, Artificial Sequence
  Cyclic GFR-binding peptide
  MOD_RES (6), (7): Xaa is C or S
TVPKPXXAPTQLSAISVLYLDDSSNV

SEQ ID NO: 7487 - protein, 18 aa, Artificial Sequence
  Cyclic GFR-binding peptide
QDLSATSILYYVGRTPKV

SEQ ID NO: 7488 - protein, 26 aa, Artificial Sequence
  Cyclic GFR-binding peptide
  MOD_RES (6), (7): Xaa is C or S
YVPKPXXAPTKLSATSVLYYDDSSNV

SEQ ID NO: 7489 - protein, 19 aa, Artificial Sequence
  Cyclic GFR-binding peptide
PTKLNAISVLYFDSSNNVI

SEQ ID NO: 7490 - protein, 20 aa, Artificial Sequence
  Cyclic GFR-binding peptide
  MOD_RES (7), (7): Xaa is C or S
HVTKPTXAPTKLSAISVLYL

SEQ ID NO: 7491 - protein, 18 aa, Artificial Sequence
  Cyclic GFR-binding peptide
  MOD_RES (4), (5): Xaa is C or S
ASPXXVPQDLSPISILYK

SEQ ID NO: 7492 - protein, 13 aa, Artificial Sequence
  Cyclic GFR-binding peptide
APTKLSAISVLYL

SEQ ID NO: 7493 - protein, 19 aa, Artificial Sequence
  Cyclic GFR-binding peptide
  MOD_RES (5), (6): Xaa is C or S
SAAPXXVPQALSATSILYY

SEQ ID NO: 7494 - protein, 21 aa, Artificial Sequence
  Cyclic GFR-binding peptide
QVQLSATSVLYYEIVRKKPIF

SEQ ID NO: 7495 - protein, 25 aa, Artificial Sequence
  Cyclic GFR-binding peptide
  MOD_RES (5), (5): Xaa is C or S
RNVQXRPTQVQLNAISVLYFEIVRK

SEQ ID NO: 7496 - protein, 17 aa, Artificial Sequence
  Cyclic GFR-binding peptide
  MOD_RES (3), (4): Xaa is C or S
KAXXAPTKLNAISVLYF

SEQ ID NO: 7497 - protein, 23 aa, Artificial Sequence
  Cyclic GFR-binding peptide
  MOD_RES (6), (7): Xaa is C or S
KVGKAXXVPTKLSATSVLYYDDM

SEQ ID NO: 7498 - protein, 17 aa, Artificial Sequence
  Cyclic GFR-binding peptide
  MOD_RES (3), (4): Xaa is C or S
SPXXVPQDLSPISILYK

SEQ ID NO: 7499 - protein, 26 aa, Artificial Sequence
  Cyclic GFR-binding peptide
  MOD_RES (6), (7): Xaa is C or S
ASASPXXVPQDLSAISILYLVGRTPK

SEQ ID NO: 7500 - protein, 17 aa, Artificial Sequence
  Cyclic GFR-binding peptide
ELSATSMLYYDEYDKVV

SEQ ID NO: 7501 - protein, 19 aa, Artificial Sequence
  Cyclic GFR-binding peptide
  MOD_RES (5), (6): Xaa is C or S
SASPXXVPQDLSATSILYY

SEQ ID NO: 7502 - protein, 23 aa, Artificial Sequence
  Cyclic GFR-binding peptide
  MOD_RES (6), (7): Xaa is C or S
SIPKAXXVPTELSATSMLYYDEY

SEQ ID NO: 7503 - protein, 15 aa, Artificial Sequence
  Cyclic GFR-binding peptide
SAISVLYLDDMGVPT

SEQ ID NO: 7504 - protein, 16 aa, Artificial Sequence
  Cyclic GFR-binding peptide
  MOD_RES (2), (3): Xaa is C or S
PXXVPQALSPISILYK

SEQ ID NO: 7505 - protein, 22 aa, Artificial Sequence
  Cyclic GFR-binding peptide
  MOD_RES (6), (7): Xaa is C or S
ASASPXXVSQDLSAISILYLIG

SEQ ID NO: 7506 - protein, 16 aa, Artificial Sequence
  Cyclic GFR-binding peptide
  MOD_RES (2), (3): Xaa is C or S
PXXAPTKLSATSVLYY

SEQ ID NO: 7507 - protein, 26 aa, Artificial Sequence
  Cyclic GFR-binding peptide
  MOD_RES (6), (7): Xaa is C or S
ASAAPXXVPQALNAISILYFVGRKPK

SEQ ID NO: 7508 - protein, 22 aa, Artificial Sequence
  Cyclic GFR-binding peptide
  MOD_RES (6), (7): Xaa is C or S
AVPKAXXAPTKLSAISVLYLDS

SEQ ID NO: 7509 - protein, 23 aa, Artificial Sequence
  Cyclic GFR-binding peptide
  MOD_RES (6), (7): Xaa is C or S
AVPKAXXAPTKLSAISVLYLDSS

SEQ ID NO: 7510 - protein, 17 aa, Artificial Sequence
  Cyclic GFR-binding peptide
  MOD_RES (3), (4): Xaa is C or S
KAXXVPTKLNAISVLYF

SEQ ID NO: 7511 - protein, 15 aa, Artificial Sequence
  Cyclic GFR-binding peptide
RPTQVQLNAISVLYF

SEQ ID NO: 7512 - protein, 27 aa, Artificial Sequence
  Cyclic GFR-binding peptide
  MOD_RES (6), (7): Xaa is C or S
ASASPXXVSQDLSPISILYKIGKTPKI

SEQ ID NO: 7513 - protein, 22 aa, Artificial Sequence
  Cyclic GFR-binding peptide
  MOD_RES (6), (7): Xaa is C or S
ASASPXXVPQDLSPISILYKVG

SEQ ID NO: 7514 - protein, 15 aa, Artificial Sequence
  Cyclic GFR-binding peptide
  MOD_RES (1), (2): Xaa is C or S
XXVPQDLNAISILYF

SEQ ID NO: 7515 - protein, 14 aa, Artificial Sequence
  Cyclic GFR-binding peptide
  MOD_RES (1), (1): Xaa is C or S
XVPTELSPISMLYK

SEQ ID NO: 7516 - protein, 17 aa, Artificial Sequence
  Cyclic GFR-binding peptide
  MOD_RES (3), (4): Xaa is C or S
SPXXVSQDLSATSILYY

SEQ ID NO: 7517 - protein, 18 aa, Artificial Sequence
  Cyclic GFR-binding peptide
TKLSATSVLYYDDSSNVI

SEQ ID NO: 7518 - protein, 22 aa, Artificial Sequence
  Cyclic GFR-binding peptide
  MOD_RES (6), (7): Xaa is C or S
ASASPXXVPQDLSATSILYYVG

SEQ ID NO: 7519 - protein, 18 aa, Artificial Sequence
  Cyclic GFR-binding peptide
TQLSATSVLYYDDSSNVI

SEQ ID NO: 7520 - protein, 21 aa, Artificial Sequence
  Cyclic GFR-binding peptide
  MOD_RES (5), (5): Xaa is C or S
RNVQXRPTQVQLSAISVLYLE

SEQ ID NO: 7521 - protein, 17 aa, Artificial Sequence
  Cyclic GFR-binding peptide
ELNAISMLYFDENEKVV

SEQ ID NO: 7522 - protein, 17 aa, Artificial Sequence
  Cyclic GFR-binding peptide
SPISVLYKEIVRKKPIF

SEQ ID NO: 7523 - protein, 21 aa, Artificial Sequence
  Cyclic GFR-binding peptide
QVQLSPISVLYKEIVRKKPIF

SEQ ID NO: 7524 - protein, 21 aa, Artificial Sequence
  Cyclic GFR-binding peptide
  MOD_RES (6), (7): Xaa is C or S
AVPKAXXAPTKLSPISVLYKD

SEQ ID NO: 7525 - protein, 24 aa, Artificial Sequence
  Cyclic GFR-binding peptide
  MOD_RES (6), (7): Xaa is C or S
TVPKPXXAPTQLSPISVLYKDDSS

SEQ ID NO: 7526 - protein, 23 aa, Artificial Sequence
  Cyclic GFR-binding peptide
  MOD_RES (7), (7): Xaa is C or S
HVTKPTXAPTKLSATSVLYYDDS

SEQ ID NO: 7527 - protein, 14 aa, Artificial Sequence
  Cyclic GFR-binding peptide
  MOD_RES (1), (1): Xaa is C or S
XVPQDLSAISILYL

SEQ ID NO: 7528 - protein, 16 aa, Artificial Sequence
  Cyclic GFR-binding peptide
LSATSMLYYDEYDKVV

SEQ ID NO: 7529 - protein, 15 aa, Artificial Sequence
  Cyclic GFR-binding peptide
  MOD_RES (2), (2): Xaa is C or S
TXAPTKLSPISVLYK

SEQ ID NO: 7530 - protein, 22 aa, Artificial Sequence
  Cyclic GFR-binding peptide
  MOD_RES (6), (7): Xaa is C or S
KIPKAXXVPTELSATSMLYYDE

SEQ ID NO: 7531 - protein, 18 aa, Artificial Sequence
  Cyclic GFR-binding peptide
  MOD_RES (4), (5): Xaa is C or S
PKPXXAPTKLSAISVLYL

SEQ ID NO: 7532 - protein, 18 aa, Artificial Sequence
  Cyclic GFR-binding peptide
TELNAISMLYFDEYDKVV

SEQ ID NO: 7533 - protein, 14 aa, Artificial Sequence
  Cyclic GFR-binding peptide
  MOD_RES (1), (1): Xaa is C or S
XVSQDLNAISILYF

SEQ ID NO: 7534 - protein, 26 aa, Artificial Sequence
  Cyclic GFR-binding peptide
  MOD_RES (6), (7): Xaa is C or S
TVPKPXXAPTQLSPISVLYKDDSSNV

SEQ ID NO: 7535 - protein, 21 aa, Artificial Sequence
  Cyclic GFR-binding peptide
  MOD_RES (6), (7): Xaa is C or S
KIPKAXXVPTELSATSMLYYD

SEQ ID NO: 7536 - protein, 15 aa, Artificial Sequence
  Cyclic GFR-binding peptide
  MOD_RES (1), (2): Xaa is C or S
XXVPTELSPISMLYK

SEQ ID NO: 7537 - protein, 26 aa, Artificial Sequence
  Cyclic GFR-binding peptide
  MOD_RES (6), (7): Xaa is C or S
YVPKPXXAPTKLSPISVLYKDDSSNV

SEQ ID NO: 7538 - protein, 14 aa, Artificial Sequence
  Cyclic GFR-binding peptide
  MOD_RES (1), (1): Xaa is C or S
XVPQDLNAISILYF

SEQ ID NO: 7539 - protein, 13 aa, Artificial Sequence
  Cyclic GFR-binding peptide
VPQDLNAISILYF

SEQ ID NO: 7540 - protein, 25 aa, Artificial Sequence
  Cyclic GFR-binding peptide
  MOD_RES (5), (5): Xaa is C or S
RNVQXRPTQVQLSPISVLYKEIVRK

SEQ ID NO: 7541 - protein, 15 aa, Artificial Sequence
  Cyclic GFR-binding peptide
  MOD_RES (1), (2): Xaa is C or S
XXVSQDLSATSILYY

SEQ ID NO: 7542 - protein, 15 aa, Artificial Sequence
  Cyclic GFR-binding peptide
NAISVLYFDSSNNVI

SEQ ID NO: 7543 - protein, 22 aa, Artificial Sequence
  Cyclic GFR-binding peptide
  MOD_RES (6), (7): Xaa is C or S
YVPKPXXAPTKLSATSVLYYDD

SEQ ID NO: 7544 - protein, 16 aa, Artificial Sequence
  Cyclic GFR-binding peptide
LSPISMLYKDENEKVV

SEQ ID NO: 7545 - protein, 15 aa, Artificial Sequence
  Cyclic GFR-binding peptide
  MOD_RES (1), (2): Xaa is C or S
XXAPTKLSAISVLYL

SEQ ID NO: 7546 - protein, 15 aa, Artificial Sequence
  Cyclic GFR-binding peptide
SATSVLYYDDMGVPT

SEQ ID NO: 7547 - protein, 16 aa, Artificial Sequence
  Cyclic GFR-binding peptide
  MOD_RES (2), (3): Xaa is C or S
AXXVPTKLNAISVLYF

SEQ ID NO: 7548 - protein, 25 aa, Artificial Sequence
  Cyclic GFR-binding peptide
  MOD_RES (6), (7): Xaa is C or S
ASASPXXVSQDLSPISILYKIGKTP

SEQ ID NO: 7549 - protein, 16 aa, Artificial Sequence
  Cyclic GFR-binding peptide
  MOD_RES (2), (3): Xaa is C or S
PXXVSQDLSPISILYK

SEQ ID NO: 7550 - protein, 24 aa, Artificial Sequence
  Cyclic GFR-binding peptide
  MOD_RES (6), (7): Xaa is C or S
SIPKAXXVPTELNAISMLYFDEYD

SEQ ID NO: 7551 - protein, 25 aa, Artificial Sequence
  Cyclic GFR-binding peptide
  MOD_RES (6), (7): Xaa is C or S
KVGKAXXVPTKLNAISVLYFDDMGV

SEQ ID NO: 7552 - protein, 18 aa, Artificial Sequence
  Cyclic GFR-binding peptide
  MOD_RES (4), (5): Xaa is C or S
ASPXXVSQDLNAISILYF

SEQ ID NO: 7553 - protein, 20 aa, Artificial Sequence
  Cyclic GFR-binding peptide
  MOD_RES (6), (7): Xaa is C or S
YVPKPXXAPTKLSATSVLYY

SEQ ID NO: 7554 - protein, 16 aa, Artificial Sequence
  Cyclic GFR-binding peptide
  MOD_RES (2), (3): Xaa is C or S
AXXVPTKLSAISVLYL

SEQ ID NO: 7555 - protein, 26 aa, Artificial Sequence
  Cyclic GFR-binding peptide
  MOD_RES (7), (7): Xaa is C or S
HVTKPTXAPTKLSATSVLYYDDSSNV

SEQ ID NO: 7556 - protein, 25 aa, Artificial Sequence
  Cyclic GFR-binding peptide
  MOD_RES (6), (7): Xaa is C or S
ASAAPXXVPQALSATSILYYVGRKP

SEQ ID NO: 7557 - protein, 19 aa, Artificial Sequence
  Cyclic GFR-binding peptide
PTELSPISMLYKDENEKVV

SEQ ID NO: 7558 - protein, 19 aa, Artificial Sequence
  Cyclic GFR-binding peptide
  MOD_RES (4), (4): Xaa is C or S
NVQXRPTQVQLNAISVLYF

SEQ ID NO: 7559 - protein, 28 aa, Artificial Sequence
  Cyclic GFR-binding peptide
  MOD_RES (5), (5): Xaa is C or S
RNVQXRPTQVQLNAISVLYFEIVRKKPI

SEQ ID NO: 7560 - protein, 18 aa, Artificial Sequence
  Cyclic GFR-binding peptide
LSPISVLYKEIVRKKPIF

SEQ ID NO: 7561 - protein, 17 aa, Artificial Sequence
  Cyclic GFR-binding peptide
KLNAISVLYFDDMGVPT

SEQ ID NO: 7562 - protein, 27 aa, Artificial Sequence
  Cyclic GFR-binding peptide
  MOD_RES (6), (7): Xaa is C or S
YVPKPXXAPTKLSPISVLYKDDSSNVI

SEQ ID NO: 7563 - protein, 18 aa, Artificial Sequence
  Cyclic GFR-binding peptide
TKLSPISVLYKDSSNNVI

SEQ ID NO: 7564 - protein, 18 aa, Artificial Sequence
  Cyclic GFR-binding peptide
QDLSATSILYYIGKTPKI

SEQ ID NO: 7565 - protein, 19 aa, Artificial Sequence
  Cyclic GFR-binding peptide
  MOD_RES (5), (6): Xaa is C or S
IPKAXXVPTELSATSMLYY

SEQ ID NO: 7566 - protein, 19 aa, Artificial Sequence
  Cyclic GFR-binding peptide
PTELSATSMLYYDEYDKVV

SEQ ID NO: 7567 - protein, 18 aa, Artificial Sequence
  Cyclic GFR-binding peptide
  MOD_RES (4), (5): Xaa is C or S
ASPXXVSQDLSAISILYL

SEQ ID NO: 7568 - protein, 27 aa, Artificial Sequence
  Cyclic GFR-binding peptide
  MOD_RES (6), (7): Xaa is C or S
ASASPXXVSQDLNAISILYFIGKTPKI

SEQ ID NO: 7569 - protein, 15 aa, Artificial Sequence
  Cyclic GFR-binding peptide
SATSMLYYDENEKVV

SEQ ID NO: 7570 - protein, 17 aa, Artificial Sequence
  Cyclic GFR-binding peptide
  MOD_RES (3), (4): Xaa is C or S
SPXXVSQDLSPISILYK

SEQ ID NO: 7571 - protein, 17 aa, Artificial Sequence
  Cyclic GFR-binding peptide
NAISVLYFEIVRKKPIF

SEQ ID NO: 7572 - protein, 17 aa, Artificial Sequence
  Cyclic GFR-binding peptide
DLSAISILYLIGKTPKI

SEQ ID NO: 7573 - protein, 17 aa, Artificial Sequence
  Cyclic GFR-binding peptide
KLNAISVLYFDSSNNVI

SEQ ID NO: 7574 - protein, 14 aa, Artificial Sequence
  Cyclic GFR-binding peptide
  MOD_RES (1), (1): Xaa is C or S
XVPQALNAISILYF

SEQ ID NO: 7575 - protein, 27 aa, Artificial Sequence
  Cyclic GFR-binding peptide
  MOD_RES (6), (7): Xaa is C or S
ASASPXXVPQDLNAISILYFVGRTPKV

SEQ ID NO: 7576 - protein, 21 aa, Artificial Sequence
  Cyclic GFR-binding peptide
  MOD_RES (6), (7): Xaa is C or S
SIPKAXXVPTELSATSMLYYD

SEQ ID NO: 7577 - protein, 17 aa, Artificial Sequence
  Cyclic GFR-binding peptide
  MOD_RES (3), (4): Xaa is C or S
KAXXAPTKLSAISVLYL

SEQ ID NO: 7578 - protein, 21 aa, Artificial Sequence
  Cyclic GFR-binding peptide
  MOD_RES (6), (7): Xaa is C or S
ASAAPXXVPQALSATSILYYV

SEQ ID NO: 7579 - protein, 17 aa, Artificial Sequence
  Cyclic GFR-binding peptide
DLNAISILYFIGKTPKI

SEQ ID NO: 7580 - protein, 25 aa, Artificial Sequence
  Cyclic GFR-binding peptide
  MOD_RES (6), (7): Xaa is C or S
ASASPXXVSQDLSAISILYLIGKTP

SEQ ID NO: 7581 - protein, 23 aa, Artificial Sequence
  Cyclic GFR-binding peptide
  MOD_RES (6), (7): Xaa is C or S
ASASPXXVSQDLSAISILYLIGK

SEQ ID NO: 7582 - protein, 20 aa, Artificial Sequence
  Cyclic GFR-binding peptide
VQLSPISVLYKEIVRKKPIF

SEQ ID NO: 7583 - protein, 22 aa, Artificial Sequence
  Cyclic GFR-binding peptide
  MOD_RES (5), (5): Xaa is C or S
RNVQXRPTQVQLSPISVLYKEI

SEQ ID NO: 7584 - protein, 24 aa, Artificial Sequence
  Cyclic GFR-binding peptide
  MOD_RES (6), (7): Xaa is C or S
ASAAPXXVPQALSPISILYKVGRK

SEQ ID NO: 7585 - protein, 26 aa, Artificial Sequence
  Cyclic GFR-binding peptide
  MOD_RES (6), (7): Xaa is C or S
ASASPXXVPQDLSATSILYYVGRTPK

SEQ ID NO: 7586 - protein, 24 aa, Artificial Sequence
  Cyclic GFR-binding peptide
  MOD_RES (7), (7): Xaa is C or S
HVTKPTXAPTKLSAISVLYLDDSS

SEQ ID NO: 7587 - protein, 19 aa, Artificial Sequence
  Cyclic GFR-binding peptide
  MOD_RES (5), (6): Xaa is C or S
IPKAXXVPTELSPISMLYK

SEQ ID NO: 7588 - protein, 16 aa, Artificial Sequence
  Cyclic GFR-binding peptide
LSPISILYKIGKTPKI

SEQ ID NO: 7589 - protein, 27 aa, Artificial Sequence
  Cyclic GFR-binding peptide
  MOD_RES (6), (7): Xaa is C or S
SIPKAXXVPTELSATSMLYYDEYDKVV

SEQ ID NO: 7590 - protein, 24 aa, Artificial Sequence
  Cyclic GFR-binding peptide
  MOD_RES (6), (7): Xaa is C or S
YVPKPXXAPTKLSAISVLYLDDSS

SEQ ID NO: 7591 - protein, 26 aa, Artificial Sequence
  Cyclic GFR-binding peptide
  MOD_RES (6), (7): Xaa is C or S
SIPKAXXVPTELSPISMLYKDEYDKV

SEQ ID NO: 7592 - protein, 17 aa, Artificial Sequence
  Cyclic GFR-binding peptide
  MOD_RES (3), (4): Xaa is C or S
SPXXVPQDLSATSILYY

SEQ ID NO: 7593 - protein, 27 aa, Artificial Sequence
  Cyclic GFR-binding peptide
  MOD_RES (6), (7): Xaa is C or S
ASASPXXVPQDLSAISILYLVGRTPKV

SEQ ID NO: 7594 - protein, 16 aa, Artificial Sequence
  Cyclic GFR-binding peptide
  MOD_RES (2), (3): Xaa is C or S
AXXVPTELSPISMLYK

SEQ ID NO: 7595 - protein, 19 aa, Artificial Sequence
  Cyclic GFR-binding peptide
  MOD_RES (4), (4): Xaa is C or S
NVQXRPTQVQLSAISVLYL

SEQ ID NO: 7596 - protein, 19 aa, Artificial Sequence
  Cyclic GFR-binding peptide
PTKLNAISVLYFDDMGVPT

SEQ ID NO: 7597 - protein, 24 aa, Artificial Sequence
  Cyclic GFR-binding peptide
  MOD_RES (6), (7): Xaa is C or S
KVGKAXXVPTKLSATSVLYYDDMG

SEQ ID NO: 7598 - protein, 17 aa, Artificial Sequence
  Cyclic GFR-binding peptide
ALSATSILYYVGRKPKV

SEQ ID NO: 7599 - protein, 16 aa, Artificial Sequence
  Cyclic GFR-binding peptide
LSAISILYLVGRKPKV

SEQ ID NO: 7600 - protein, 18 aa, Artificial Sequence
  Cyclic GFR-binding peptide
  MOD_RES (5), (5): Xaa is C or S
TKPTXAPTKLSATSVLYY

SEQ ID NO: 7601 - protein, 13 aa, Artificial Sequence
  Cyclic GFR-binding peptide
VPTELSPISMLYK

SEQ ID NO: 7602 - protein, 21 aa, Artificial Sequence
  Cyclic GFR-binding peptide
  MOD_RES (6), (7): Xaa is C or S
TVPKPXXAPTQLSATSVLYYD

SEQ ID NO: 7603 - protein, 16 aa, Artificial Sequence
  Cyclic GFR-binding peptide
LNAISILYFVGRTPKV

SEQ ID NO: 7604 - protein, 21 aa, Artificial Sequence
  Cyclic GFR-binding peptide
  MOD_RES (6), (7): Xaa is C or S
AVPKAXXAPTKLNAISVLYFD

SEQ ID NO: 7605 - protein, 13 aa, Artificial Sequence
  Cyclic GFR-binding peptide
VPTKLNAISVLYF

SEQ ID NO: 7606 - protein, 17 aa, Artificial Sequence
  Cyclic GFR-binding peptide
ELNAISMLYFDEYDKVV

SEQ ID NO: 7607 - protein, 14 aa, Artificial Sequence
  Cyclic GFR-binding peptide
  MOD_RES (1), (1): Xaa is C or S
XVSQDLSPISILYK

SEQ ID NO: 7608 - protein, 19 aa, Artificial Sequence
  Cyclic GFR-binding peptide
  MOD_RES (5), (6): Xaa is C or S
VPKAXXAPTKLNAISVLYF

SEQ ID NO: 7609 - protein, 24 aa, Artificial Sequence
  Cyclic GFR-binding peptide
  MOD_RES (6), (7): Xaa is C or S
YVPKPXXAPTKLSPISVLYKDDSS

SEQ ID NO: 7610 - protein, 15 aa, Artificial Sequence
  Cyclic GFR-binding peptide
SPISVLYKDSSNNVI

SEQ ID NO: 7611 - protein, 25 aa, Artificial Sequence
  Cyclic GFR-binding peptide
  MOD_RES (6), (7): Xaa is C or S
ASAAPXXVPQALNAISILYFVGRKP

SEQ ID NO: 7612 - protein, 21 aa, Artificial Sequence
  Cyclic GFR-binding peptide
  MOD_RES (5), (5): Xaa is C or S
RNVQXRPTQVQLSPISVLYKE

SEQ ID NO: 7613 - protein, 16 aa, Artificial Sequence
  Cyclic GFR-binding peptide
  MOD_RES (1), (1): Xaa is C or S
XRPTQVQLNAISVLYF

SEQ ID NO: 7614 - protein, 21 aa, Artificial Sequence
  Cyclic GFR-binding peptide
  MOD_RES (6), (7): Xaa is C or S
YVPKPXXAPTKLSPISVLYKD

SEQ ID NO: 7615 - protein, 15 aa, Artificial Sequence
  Cyclic GFR-binding peptide
SPISMLYKDEYDKVV

SEQ ID NO: 7616 - protein, 27 aa, Artificial Sequence
  Cyclic GFR-binding peptide
  MOD_RES (6), (7): Xaa is C or S
TVPKPXXAPTQLSAISVLYLDDSSNVI

SEQ ID NO: 7617 - protein, 23 aa, Artificial Sequence
  Cyclic GFR-binding peptide
  MOD_RES (6), (7): Xaa is C or S
TVPKPXXAPTQLSPISVLYKDDS

SEQ ID NO: 7618 - protein, 19 aa, Artificial Sequence
  Cyclic GFR-binding peptide
  MOD_RES (5), (6): Xaa is C or S
SASPXXVPQDLNAISILYF

SEQ ID NO: 7619 - protein, 19 aa, Artificial Sequence
  Cyclic GFR-binding peptide
  MOD_RES (5), (6): Xaa is C or S
VGKAXXVPTKLSAISVLYL

SEQ ID NO: 7620 - protein, 19 aa, Artificial Sequence
  Cyclic GFR-binding peptide
  MOD_RES (5), (6): Xaa is C or S
VPKAXXAPTKLSPISVLYK

SEQ ID NO: 7621 - protein, 17 aa, Artificial Sequence
  Cyclic GFR-binding peptide
KLSAISVLYLDSSNNVI

SEQ ID NO: 7622 - protein, 16 aa, Artificial Sequence
  Cyclic GFR-binding peptide
  MOD_RES (2), (3): Xaa is C or S
AXXVPTELNAISMLYF

SEQ ID NO: 7623 - protein, 17 aa, Artificial Sequence
  Cyclic GFR-binding peptide
  MOD_RES (3), (4): Xaa is C or S
APXXVPQALSATSILYY

SEQ ID NO: 7624 - protein, 27 aa, Artificial Sequence
  Cyclic GFR-binding peptide
  MOD_RES (6), (7): Xaa is C or S
YVPKPXXAPTKLSAISVLYLDDSSNVI

SEQ ID NO: 7625 - protein, 20 aa, Artificial Sequence
  Cyclic GFR-binding peptide
  MOD_RES (6), (7): Xaa is C or S
AVPKAXXAPTKLSAISVLYL

SEQ ID NO: 7626 - protein, 22 aa, Artificial Sequence
  Cyclic GFR-binding peptide
  MOD_RES (5), (5): Xaa is C or S
RNVQXRPTQVQLNAISVLYFEI

SEQ ID NO: 7627 - protein, 19 aa, Artificial Sequence
  Cyclic GFR-binding peptide
PTQLSAISVLYLDDSSNVI

SEQ ID NO: 7628 - protein, 19 aa, Artificial Sequence
  Cyclic GFR-binding peptide
PTKLSATSVLYYDDMGVPT

SEQ ID NO: 7629 - protein, 17 aa, Artificial Sequence
  Cyclic GFR-binding peptide
ELSPISMLYKDEYDKVV

SEQ ID NO: 7630 - protein, 17 aa, Artificial Sequence
  Cyclic GFR-binding peptide
  MOD_RES (3), (4): Xaa is C or S
APXXVPQALSAISILYL

SEQ ID NO: 7631 - protein, 20 aa, Artificial Sequence
  Cyclic GFR-binding peptide
VQLSATSVLYYEIVRKKPIF

SEQ ID NO: 7632 - protein, 16 aa, Artificial Sequence
  Cyclic GFR-binding peptide
  MOD_RES (3), (3): Xaa is C or S
PTXAPTKLSAISVLYL

SEQ ID NO: 7633 - protein, 15 aa, Artificial Sequence
  Cyclic GFR-binding peptide
SAISVLYLDSSNNVI

SEQ ID NO: 7634 - protein, 25 aa, Artificial Sequence
  Cyclic GFR-binding peptide
  MOD_RES (6), (7): Xaa is C or S
ASAAPXXVPQALSPISILYKVGRKP

SEQ ID NO: 7635 - protein, 23 aa, Artificial Sequence
  Cyclic GFR-binding peptide
  MOD_RES (6), (7): Xaa is C or S
ASASPXXVSQDLNAISILYFIGK

SEQ ID NO: 7636 - protein, 16 aa, Artificial Sequence
  Cyclic GFR-binding peptide
LSAISILYLVGRTPKV

SEQ ID NO: 7637 - protein, 24 aa, Artificial Sequence
  Cyclic GFR-binding peptide
  MOD_RES (6), (7): Xaa is C or S
ASAAPXXVPQALSAISILYLVGRK

SEQ ID NO: 7638 - protein, 24 aa, Artificial Sequence
  Cyclic GFR-binding peptide
  MOD_RES (6), (7): Xaa is C or S
AVPKAXXAPTKLSPISVLYKDSSN

SEQ ID NO: 7639 - protein, 17 aa, Artificial Sequence
  Cyclic GFR-binding peptide
DLSPISILYKIGKTPKI

SEQ ID NO: 7640 - protein, 17 aa, Artificial Sequence
  Cyclic GFR-binding peptide
  MOD_RES (3), (4): Xaa is C or S
KPXXAPTKLSATSVLYY

SEQ ID NO: 7641 - protein, 22 aa, Artificial Sequence
  Cyclic GFR-binding peptide
  MOD_RES (6), (7): Xaa is C or S
ASAAPXXVPQALNAISILYFVG

SEQ ID NO: 7642 - protein, 25 aa, Artificial Sequence
  Cyclic GFR-binding peptide
  MOD_RES (6), (7): Xaa is C or S
KVGKAXXVPTKLSATSVLYYDDMGV

SEQ ID NO: 7643 - protein, 15 aa, Artificial Sequence
  Cyclic GFR-binding peptide
SATSVLYYDDSSNVI

SEQ ID NO: 7644 - protein, 20 aa, Artificial Sequence
  Cyclic GFR-binding peptide
  MOD_RES (6), (7): Xaa is C or S
KVGKAXXVPTKLSAISVLYL

SEQ ID NO: 7645 - protein, 23 aa, Artificial Sequence
  Cyclic GFR-binding peptide
  MOD_RES (7), (7): Xaa is C or S
HVTKPTXAPTKLSAISVLYLDDS

SEQ ID NO: 7646 - protein, 16 aa, Artificial Sequence
  Cyclic GFR-binding peptide
  MOD_RES (2), (3): Xaa is C or S
AXXAPTKLSPISVLYK

SEQ ID NO: 7647 - protein, 19 aa, Artificial Sequence
  Cyclic GFR-binding peptide
QLSAISVLYLEIVRKKPIF

SEQ ID NO: 7648 - protein, 24 aa, Artificial Sequence
  Cyclic GFR-binding peptide
  MOD_RES (6), (7): Xaa is C or S
KIPKAXXVPTELNAISMLYFDENE

SEQ ID NO: 7649 - protein, 19 aa, Artificial Sequence
  Cyclic GFR-binding peptide
PQALNAISILYFVGRKPKV

SEQ ID NO: 7650 - protein, 25 aa, Artificial Sequence
  Cyclic GFR-binding peptide
  MOD_RES (6), (7): Xaa is C or S
AVPKAXXAPTKLSPISVLYKDSSNN

SEQ ID NO: 7651 - protein, 23 aa, Artificial Sequence
  Cyclic GFR-binding peptide
  MOD_RES (6), (7): Xaa is C or S
ASASPXXVPQDLSPISILYKVGR

SEQ ID NO: 7652 - protein, 13 aa, Artificial Sequence
  Cyclic GFR-binding peptide
VPTKLSAISVLYL

SEQ ID NO: 7653 - protein, 16 aa, Artificial Sequence
  Cyclic GFR-binding peptide
  MOD_RES (2), (3): Xaa is C or S
PXXAPTKLSAISVLYL

SEQ ID NO: 7654 - protein, 15 aa, Artificial Sequence
  Cyclic GFR-binding peptide
  MOD_RES (1), (2): Xaa is C or S
XXVPQDLSATSILYY

SEQ ID NO: 7655 - protein, 15 aa, Artificial Sequence
  Cyclic GFR-binding peptide
NAISMLYFDEYDKVV

SEQ ID NO: 7656 - protein, 20 aa, Artificial Sequence
  Cyclic GFR-binding peptide
  MOD_RES (6), (7): Xaa is C or S
KVGKAXXVPTKLSATSVLYY

SEQ ID NO: 7657 - protein, 14 aa, Artificial Sequence
  Cyclic GFR-binding peptide
PTQVQLSAISVLYL

SEQ ID NO: 7658 - protein, 18 aa, Artificial Sequence
  Cyclic GFR-binding peptide
TKLSAISVLYLDDMGVPT

SEQ ID NO: 7659 - protein, 16 aa, Artificial Sequence
  Cyclic GFR-binding peptide
LSPISVLYKDDSSNVI

SEQ ID NO: 7660 - protein, 16 aa, Artificial Sequence
  Cyclic GFR-binding peptide
LSPISILYKVGRKPKV

SEQ ID NO: 7661 - protein, 13 aa, Artificial Sequence
  Cyclic GFR-binding peptide
VSQDLNAISILYF

SEQ ID NO: 7662 - protein, 16 aa, Artificial Sequence
  Cyclic GFR-binding peptide
  MOD_RES (2), (3): Xaa is C or S
PXXVPQDLSPISILYK

SEQ ID NO: 7663 - protein, 15 aa, Artificial Sequence
  Cyclic GFR-binding peptide
  MOD_RES (1), (2): Xaa is C or S
XXVSQDLSPISILYK

SEQ ID NO: 7664 - protein, 27 aa, Artificial Sequence
  Cyclic GFR-binding peptide
  MOD_RES (6), (7): Xaa is C or S
TVPKPXXAPTQLSPISVLYKDDSSNVI

SEQ ID NO: 7665 - protein, 26 aa, Artificial Sequence
  Cyclic GFR-binding peptide
  MOD_RES (6), (7): Xaa is C or S
KIPKAXXVPTELSPISMLYKDENEKV

SEQ ID NO: 7666 - protein, 22 aa, Artificial Sequence
  Cyclic GFR-binding peptide
  MOD_RES (6), (7): Xaa is C or S
KVGKAXXVPTKLSAISVLYLDD

SEQ ID NO: 7667 - protein, 17 aa, Artificial Sequence
  Cyclic GFR-binding peptide
  MOD_RES (4), (4): Xaa is C or S
KPTXAPTKLSPISVLYK

SEQ ID NO: 7668 - protein, 19 aa, Artificial Sequence
  Cyclic GFR-binding peptide
PTKLSAISVLYLDDSSNVI

SEQ ID NO: 7669 - protein, 14 aa, Artificial Sequence
  Cyclic GFR-binding peptide
  MOD_RES (1), (1): Xaa is C or S
XVSQDLSATSILYY

SEQ ID NO: 7670 - protein, 13 aa, Artificial Sequence
  Cyclic GFR-binding peptide
VPTELSATSMLYY

SEQ ID NO: 7671 - protein, 16 aa, Artificial Sequence
  Cyclic GFR-binding peptide
LSPISILYKVGRTPKV

SEQ ID NO: 7672 - protein, 15 aa, Artificial Sequence
  Cyclic GFR-binding peptide
  MOD_RES (1), (2): Xaa is C or S
XXVPQALSPISILYK

SEQ ID NO: 7673 - protein, 19 aa, Artificial Sequence
  Cyclic GFR-binding peptide
PQALSATSILYYVGRKPKV

SEQ ID NO: 7674 - protein, 24 aa, Artificial Sequence
  Cyclic GFR-binding peptide
  MOD_RES (6), (7): Xaa is C or S
ASASPXXVPQDLNAISILYFVGRT

SEQ ID NO: 7675 - protein, 19 aa, Artificial Sequence
  Cyclic GFR-binding peptide
QLNAISVLYFEIVRKKPIF

SEQ ID NO: 7676 - protein, 17 aa, Artificial Sequence
  Cyclic GFR-binding peptide
QLSATSVLYYDDSSNVI

SEQ ID NO: 7677 - protein, 16 aa, Artificial Sequence
  Cyclic GFR-binding peptide
  MOD_RES (2), (3): Xaa is C or S
AXXVPTELSATSMLYY

SEQ ID NO: 7678 - protein, 21 aa, Artificial Sequence
  Cyclic GFR-binding peptide
  MOD_RES (6), (7): Xaa is C or S
KVGKAXXVPTKLNAISVLYFD

SEQ ID NO: 7679 - protein, 19 aa, Artificial Sequence
  Cyclic GFR-binding peptide
  MOD_RES (5), (6): Xaa is C or S
SASPXXVSQDLNAISILYF

SEQ ID NO: 7680 - protein, 17 aa, Artificial Sequence
  Cyclic GFR-binding peptide
  MOD_RES (4), (4): Xaa is C or S
KPTXAPTKLSATSVLYY

SEQ ID NO: 7681 - protein, 21 aa, Artificial Sequence
  Cyclic GFR-binding peptide
  MOD_RES (6), (7): Xaa is C or S
ASASPXXVSQDLSATSILYYI

SEQ ID NO: 7682 - protein, 17 aa, Artificial Sequence
  Cyclic GFR-binding peptide
KLSATSVLYYDDSSNVI

SEQ ID NO: 7683 - protein, 18 aa, Artificial Sequence
  Cyclic GFR-binding peptide
QALNAISILYFVGRKPKV

SEQ ID NO: 7684 - protein, 16 aa, Artificial Sequence
  Cyclic GFR-binding peptide
LNAISILYFIGKTPKI

SEQ ID NO: 7685 - protein, 18 aa, Artificial Sequence
  Cyclic GFR-binding peptide
  MOD_RES (4), (5): Xaa is C or S
AAPXXVPQALSPISILYK

SEQ ID NO: 7686 - protein, 13 aa, Artificial Sequence
  Cyclic GFR-binding peptide
VPTKLSATSVLYY

SEQ ID NO: 7687 - protein, 20 aa, Artificial Sequence
  Cyclic GFR-binding peptide
  MOD_RES (6), (7): Xaa is C or S
YVPKPXXAPTKLSAISVLYL

SEQ ID NO: 7688 - protein, 18 aa, Artificial Sequence
  Cyclic GFR-binding peptide
QALSAISILYLVGRKPKV

SEQ ID NO: 7689 - protein, 25 aa, Artificial Sequence
  Cyclic GFR-binding peptide
  MOD_RES (6), (7): Xaa is C or S
AVPKAXXAPTKLNAISVLYFDSSNN

SEQ ID NO: 7690 - protein, 25 aa, Artificial Sequence
  Cyclic GFR-binding peptide
  MOD_RES (7), (7): Xaa is C or S
HVTKPTXAPTKLSPISVLYKDDSSN

SEQ ID NO: 7691 - protein, 20 aa, Artificial Sequence
  Cyclic GFR-binding peptide
  MOD_RES (6), (7): Xaa is C or S
KVGKAXXVPTKLNAISVLYF

SEQ ID NO: 7692 - protein, 18 aa, Artificial Sequence
  Cyclic GFR-binding peptide
  MOD_RES (4), (5): Xaa is C or S
PKPXXAPTQLSPISVLYK

SEQ ID NO: 7693 - protein, 18 aa, Artificial Sequence
  Cyclic GFR-binding peptide
TELSATSMLYYDEYDKVV

SEQ ID NO: 7694 - protein, 26 aa, Artificial Sequence
  Cyclic GFR-binding peptide
  MOD_RES (6), (7): Xaa is C or S
ASASPXXVSQDLSPISILYKIGKTPK

SEQ ID NO: 7695 - protein, 13 aa, Artificial Sequence
  Cyclic GFR-binding peptide
APTQLSPISVLYK

SEQ ID NO: 7696 - protein, 27 aa, Artificial Sequence
  Cyclic GFR-binding peptide
  MOD_RES (6), (7): Xaa is C or S
ASASPXXVPQDLSPISILYKVGRTPKV

SEQ ID NO: 7697 - protein, 25 aa, Artificial Sequence
  Cyclic GFR-binding peptide
  MOD_RES (6), (7): Xaa is C or S
ASASPXXVPQDLSAISILYLVGRTP

SEQ ID NO: 7698 - protein, 23 aa, Artificial Sequence
  Cyclic GFR-binding peptide
  MOD_RES (6), (7): Xaa is C or S
YVPKPXXAPTKLSATSVLYYDDS

SEQ ID NO: 7699 - protein, 24 aa, Artificial Sequence
  Cyclic GFR-binding peptide
  MOD_RES (6), (7): Xaa is C or S
AVPKAXXAPTKLNAISVLYFDSSN

SEQ ID NO: 7700 - protein, 14 aa, Artificial Sequence
  Cyclic GFR-binding peptide
  MOD_RES (1), (1): Xaa is C or S
XVPQALSATSILYY

SEQ ID NO: 7701 - protein, 25 aa, Artificial Sequence
  Cyclic GFR-binding peptide
  MOD_RES (6), (7): Xaa is C or S
ASAAPXXVPQALSAISILYLVGRKP

SEQ ID NO: 7702 - protein, 26 aa, Artificial Sequence
  Cyclic GFR-binding peptide
  MOD_RES (6), (7): Xaa is C or S
KIPKAXXVPTELSATSMLYYDENEKV

SEQ ID NO: 7703 - protein, 22 aa, Artificial Sequence
  Cyclic GFR-binding peptide
  MOD_RES (6), (7): Xaa is C or S
KIPKAXXVPTELNAISMLYFDE

SEQ ID NO: 7704 - protein, 20 aa, Artificial Sequence
  Cyclic GFR-binding peptide
  MOD_RES (6), (7): Xaa is C or S
ASAAPXXVPQALSATSILYY

SEQ ID NO: 7705 - protein, 25 aa, Artificial Sequence
  Cyclic GFR-binding peptide
  MOD_RES (7), (7): Xaa is C or S
HVTKPTXAPTKLSATSVLYYDDSSN

SEQ ID NO: 7706 - protein, 18 aa, Artificial Sequence
  Cyclic GFR-binding peptide
  MOD_RES (4), (5): Xaa is C or S
PKPXXAPTKLSATSVLYY

SEQ ID NO: 7707 - protein, 14 aa, Artificial Sequence
  Cyclic GFR-binding peptide
  MOD_RES (1), (1): Xaa is C or S
XVPQDLSPISILYK

SEQ ID NO: 7708 - protein, 23 aa, Artificial Sequence
  Cyclic GFR-binding peptide
  MOD_RES (6), (7): Xaa is C or S
TVPKPXXAPTQLSATSVLYYDDS

SEQ ID NO: 7709 - protein, 27 aa, Artificial Sequence
  Cyclic GFR-binding peptide
  MOD_RES (6), (7): Xaa is C or S
ASAAPXXVPQALSATSILYYVGRKPKV

SEQ ID NO: 7710 - protein, 15 aa, Artificial Sequence
  Cyclic GFR-binding peptide
  MOD_RES (1), (2): Xaa is C or S
XXVPQDLSPISILYK

SEQ ID NO: 7711 - protein, 23 aa, Artificial Sequence
  Cyclic GFR-binding peptide
  MOD_RES (6), (7): Xaa is C or S
YVPKPXXAPTKLSPISVLYKDDS

SEQ ID NO: 7712 - protein, 17 aa, Artificial Sequence
  Cyclic GFR-binding peptide
  MOD_RES (2), (2): Xaa is C or S
QXRPTQVQLNAISVLYF

SEQ ID NO: 7713 - protein, 13 aa, Artificial Sequence
  Cyclic GFR-binding peptide
VPTELNAISMLYF

SEQ ID NO: 7714 - protein, 20 aa, Artificial Sequence
  Cyclic GFR-binding peptide
  MOD_RES (6), (7): Xaa is C or S
ASAAPXXVPQALSPISILYK

SEQ ID NO: 7715 - protein, 23 aa, Artificial Sequence
  Cyclic GFR-binding peptide
  MOD_RES (6), (7): Xaa is C or S
KIPKAXXVPTELSPISMLYKDEN

SEQ ID NO: 7716 - protein, 18 aa, Artificial Sequence
  Cyclic GFR-binding peptide
  MOD_RES (4), (5): Xaa is C or S
PKPXXAPTQLSATSVLYY

SEQ ID NO: 7717 - protein, 17 aa, Artificial Sequence
  Cyclic GFR-binding peptide
  MOD_RES (3), (4): Xaa is C or S
KPXXAPTQLSATSVLYY

SEQ ID NO: 7718 - protein, 15 aa, Artificial Sequence
  Cyclic GFR-binding peptide
SATSILYYVGRTPKV

SEQ ID NO: 7719 - protein, 25 aa, Artificial Sequence
  Cyclic GFR-binding peptide
  MOD_RES (5), (5): Xaa is C or S
RNVQXRPTQVQLSAISVLYLEIVRK

SEQ ID NO: 7720 - protein, 22 aa, Artificial Sequence
  Cyclic GFR-binding peptide
  MOD_RES (5), (5): Xaa is C or S
RNVQXRPTQVQLSATSVLYYEI

SEQ ID NO: 7721 - protein, 17 aa, Artificial Sequence
  Cyclic GFR-binding peptide
ELSATSMLYYDENEKVV

SEQ ID NO: 7722 - protein, 16 aa, Artificial Sequence
  Cyclic GFR-binding peptide
  MOD_RES (2), (3): Xaa is C or S
AXXVPTKLSATSVLYY

SEQ ID NO: 7723 - protein, 26 aa, Artificial Sequence
  Cyclic GFR-binding peptide
  MOD_RES (6), (7): Xaa is C or S
ASASPXXVPQDLSPISILYKVGRTPK

SEQ ID NO: 7724 - protein, 17 aa, Artificial Sequence
  Cyclic GFR-binding peptide
  MOD_RES (3), (4): Xaa is C or S
KPXXAPTKLSPISVLYK

SEQ ID NO: 7725 - protein, 21 aa, Artificial Sequence
  Cyclic GFR-binding peptide
  MOD_RES (6), (7): Xaa is C or S
KVGKAXXVPTKLSAISVLYLD

SEQ ID NO: 7726 - protein, 17 aa, Artificial Sequence
  Cyclic GFR-binding peptide
  MOD_RES (3), (4): Xaa is C or S
KPXXAPTQLSPISVLYK

SEQ ID NO: 7727 - protein, 16 aa, Artificial Sequence
  Cyclic GFR-binding peptide
LSATSVLYYDDMGVPT

SEQ ID NO: 7728 - protein, 16 aa, Artificial Sequence
  Cyclic GFR-binding peptide
LNAISILYFVGRKPKV

SEQ ID NO: 7729 - protein, 14 aa, Artificial Sequence
  Cyclic GFR-binding peptide
  MOD_RES (1), (1): Xaa is C or S
XVPQDLSATSILYY

SEQ ID NO: 7730 - protein, 14 aa, Artificial Sequence
  Cyclic GFR-binding peptide
  MOD_RES (1), (1): Xaa is C or S
XVPQALSPISILYK

SEQ ID NO: 7731 - protein, 18 aa, Artificial Sequence
  Cyclic GFR-binding peptide
  MOD_RES (3), (3): Xaa is C or S
VQXRPTQVQLSPISVLYK

SEQ ID NO: 7732 - protein, 29 aa, Artificial Sequence
  Cyclic GFR-binding peptide
  MOD_RES (5), (5): Xaa is C or S
RNVQXRPTQVQLSATSVLYYEIVRKKPIF

SEQ ID NO: 7733 - protein, 21 aa, Artificial Sequence
  Cyclic GFR-binding peptide
  MOD_RES (5), (5): Xaa is C or S
RNVQXRPTQVQLNAISVLYFE

SEQ ID NO: 7734 - protein, 18 aa, Artificial Sequence
  Cyclic GFR-binding peptide
QALSPISILYKVGRKPKV

SEQ ID NO: 7735 - protein, 20 aa, Artificial Sequence
  Cyclic GFR-binding peptide
  MOD_RES (5), (5): Xaa is C or S
RNVQXRPTQVQLSPISVLYK

SEQ ID NO: 7736 - protein, 18 aa, Artificial Sequence
  Cyclic GFR-binding peptide
  MOD_RES (5), (5): Xaa is C or S
TKPTXAPTKLSPISVLYK

SEQ ID NO: 7737 - protein, 23 aa, Artificial Sequence
  Cyclic GFR-binding peptide
  MOD_RES (6), (7): Xaa is C or S
ASAAPXXVPQALNAISILYFVGR

SEQ ID NO: 7738 - protein, 18 aa, Artificial Sequence
  Cyclic GFR-binding peptide
  MOD_RES (4), (5): Xaa is C or S
PKPXXAPTKLSPISVLYK

SEQ ID NO: 7739 - protein, 26 aa, Artificial Sequence
  Cyclic GFR-binding peptide
  MOD_RES (6), (7): Xaa is C or S
AVPKAXXAPTKLNAISVLYFDSSNNV

SEQ ID NO: 7740 - protein, 21 aa, Artificial Sequence
  Cyclic GFR-binding peptide
  MOD_RES (7), (7): Xaa is C or S
HVTKPTXAPTKLSAISVLYLD

SEQ ID NO: 7741 - protein, 15 aa, Artificial Sequence
  Cyclic GFR-binding peptide
NAISMLYFDENEKVV

SEQ ID NO: 7742 - protein, 13 aa, Artificial Sequence
  Cyclic GFR-binding peptide
APTKLSPISVLYK

SEQ ID NO: 7743 - protein, 18 aa, Artificial Sequence
  Cyclic GFR-binding peptide
TKLNAISVLYFDDMGVPT

SEQ ID NO: 7744 - protein, 18 aa, Artificial Sequence
  Cyclic GFR-binding peptide
LSAISVLYLEIVRKKPIF

SEQ ID NO: 7745 - protein, 26 aa, Artificial Sequence
  Cyclic GFR-binding peptide
  MOD_RES (6), (7): Xaa is C or S
KVGKAXXVPTKLSATSVLYYDDMGVP

SEQ ID NO: 7746 - protein, 13 aa, Artificial Sequence
  Cyclic GFR-binding peptide
APTQLSATSVLYY

SEQ ID NO: 7747 - protein, 23 aa, Artificial Sequence
  Cyclic GFR-binding peptide
  MOD_RES (6), (7): Xaa is C or S
KVGKAXXVPTKLNAISVLYFDDM

SEQ ID NO: 7748 - protein, 27 aa, Artificial Sequence
  Cyclic GFR-binding peptide
  MOD_RES (7), (7): Xaa is C or S
HVTKPTXAPTKLSATSVLYYDDSSNVI

SEQ ID NO: 7749 - protein, 17 aa, Artificial Sequence
  Cyclic GFR-binding peptide
KLSPISVLYKDSSNNVI

SEQ ID NO: 7750 - protein, 24 aa, Artificial Sequence
  Cyclic GFR-binding peptide
  MOD_RES (6), (7): Xaa is C or S
ASAAPXXVPQALNAISILYFVGRK

SEQ ID NO: 7751 - protein, 13 aa, Artificial Sequence
  Cyclic GFR-binding peptide
IFLVSIPSLKTPA

SEQ ID NO: 7752 - protein, 20 aa, Artificial Sequence
  Cyclic GFR-binding peptide
  MOD_RES (14), (14): Xaa is C or S
IFLVSIPSLKTPAXTPKTVH

SEQ ID NO: 7753 - protein, 27 aa, Artificial Sequence
  Cyclic GFR-binding peptide
  MOD_RES (21), (22): Xaa is C or S
VVKDYEDYYVMPLPELETPVXXAKPIS

SEQ ID NO: 7754 - protein, 23 aa, Artificial Sequence
  Cyclic GFR-binding peptide
  MOD_RES (17), (18): Xaa is C or S
SDDYYVVPLPELKTPAXXPKPVY

SEQ ID NO: 7755 - protein, 24 aa, Artificial Sequence
  Cyclic GFR-binding peptide
  MOD_RES (18), (19): Xaa is C or S
NASDLYLISIASLRTPVXXTPPTS

SEQ ID NO: 7756 - protein, 26 aa, Artificial Sequence
  Cyclic GFR-binding peptide
  MOD_RES (20), (21): Xaa is C or S
VNSSDDIFLVSIPSLKTPAXXPKPVY

SEQ ID NO: 7757 - protein, 19 aa, Artificial Sequence
  Cyclic GFR-binding peptide
  MOD_RES (14), (15): Xaa is C or S
YYLVTLPELKTPAXXPKPV

SEQ ID NO: 7758 - protein, 15 aa, Artificial Sequence
  Cyclic GFR-binding peptide
VKPTRGVIFLISIPS

SEQ ID NO: 7759 - protein, 24 aa, Artificial Sequence
  Cyclic GFR-binding peptide
  MOD_RES (18), (19): Xaa is C or S
SSDDIFLVSIPSLKTPAXXPKPVY

SEQ ID NO: 7760 - protein, 26 aa, Artificial Sequence
  Cyclic GFR-binding peptide
  MOD_RES (20), (20): Xaa is C or S
VNSSDDIFLVSIPSLKTPAXTPKTVH

SEQ ID NO: 7761 - protein, 20 aa, Artificial Sequence
  Cyclic GFR-binding peptide
  MOD_RES (14), (15): Xaa is C or S
IFLMSIPSLETPVXXAKPIS

SEQ ID NO: 7762 - protein, 19 aa, Artificial Sequence
  Cyclic GFR-binding peptide
  MOD_RES (14), (15): Xaa is C or S
YYVVPLPELKTPAXXPKPV

SEQ ID NO: 7763 - protein, 26 aa, Artificial Sequence
  Cyclic GFR-binding peptide
  MOD_RES (20), (21): Xaa is C or S
VNSSDDYYLVTLPELQTPAXXPKPVT

SEQ ID NO: 7764 - protein, 23 aa, Artificial Sequence
  Cyclic GFR-binding peptide
  MOD_RES (17), (18): Xaa is C or S
KGIIFLISIPSLDQSVXXPSASA

SEQ ID NO: 7765 - protein, 16 aa, Artificial Sequence
  Cyclic GFR-binding peptide
  MOD_RES (14), (15): Xaa is C or S
YYVIPLPELDQPVXXP

SEQ ID NO: 7766 - protein, 20 aa, Artificial Sequence
  Cyclic GFR-binding peptide
  MOD_RES (14), (15): Xaa is C or S
YYVIPLPELDQSVXXPSASA

SEQ ID NO: 7767 - protein, 20 aa, Artificial Sequence
  Cyclic GFR-binding peptide
  MOD_RES (14), (15): Xaa is C or S
LYLISIASLRTPVXXTPPTS

SEQ ID NO: 7768 - protein, 17 aa, Artificial Sequence
  Cyclic GFR-binding peptide
VKPTRGVYYVIPLPELD

SEQ ID NO: 7769 - protein, 16 aa, Artificial Sequence
  Cyclic GFR-binding peptide
IKPTKGIIFLISIPSL

SEQ ID NO: 7770 - protein, 18 aa, Artificial Sequence
  Cyclic GFR-binding peptide
VVKENEDIFLMSIPSLET

SEQ ID NO: 7771 - protein, 15 aa, Artificial Sequence
  Cyclic GFR-binding peptide
VVNNASDFYLISIAN

SEQ ID NO: 7772 - protein, 19 aa, Artificial Sequence
  Cyclic GFR-binding peptide
IVNSSDDYYVVPLPELKTP

SEQ ID NO: 7773 - protein, 14 aa, Artificial Sequence
  Cyclic GFR-binding peptide
  MOD_RES (14), (14): Xaa is C or S
YYVIPLPELRTPVX

SEQ ID NO: 7774 - protein, 19 aa, Artificial Sequence
  Cyclic GFR-binding peptide
IVNSSDDYYVVPLPELQTP

SEQ ID NO: 7775 - protein, 15 aa, Artificial Sequence
  Cyclic GFR-binding peptide
VVNNASDLYLISIAS

SEQ ID NO: 7776 - protein, 20 aa, Artificial Sequence
  Cyclic GFR-binding peptide
  MOD_RES (14), (15): Xaa is C or S
YYLMTLPELETPVXXAKPIK

SEQ ID NO: 7777 - protein, 15 aa, Artificial Sequence
  Cyclic GFR-binding peptide
VVKDYEDYYLMTLPE

SEQ ID NO: 7778 - protein, 15 aa, Artificial Sequence
  Cyclic GFR-binding peptide
  MOD_RES (14), (15): Xaa is C or S
YYVVPLPELKTPAXX

SEQ ID NO: 7779 - protein, 15 aa, Artificial Sequence
  Cyclic GFR-binding peptide
  MOD_RES (14), (14): Xaa is C or S
IFLVSIPSLKTPAXT

SEQ ID NO: 7780 - protein, 24 aa, Artificial Sequence
  Cyclic GFR-binding peptide
  MOD_RES (18), (19): Xaa is C or S
KRGVIFLISIPSLAQPVXXPAASA

SEQ ID NO: 7781 - protein, 13 aa, Artificial Sequence
  Cyclic GFR-binding peptide
YYVVPLPELKTPA

SEQ ID NO: 7782 - protein, 20 aa, Artificial Sequence
  Cyclic GFR-binding peptide
  MOD_RES (14), (15): Xaa is C or S
YYVMPLPELETPVXXAKPIS

SEQ ID NO: 7783 - protein, 27 aa, Artificial Sequence
  Cyclic GFR-binding peptide
  MOD_RES (21), (22): Xaa is C or S
IVNSSDDIFLVSIPSLQTPAXXPKPVT

SEQ ID NO: 7784 - protein, 14 aa, Artificial Sequence
  Cyclic GFR-binding peptide
  MOD_RES (14), (14): Xaa is C or S
YYLITLPELRTPVX

SEQ ID NO: 7785 - protein, 18 aa, Artificial Sequence
  Cyclic GFR-binding peptide
VVNNASDFYLISIANLRT

SEQ ID NO: 7786 - protein, 14 aa, Artificial Sequence
  Cyclic GFR-binding peptide
  MOD_RES (14), (14): Xaa is C or S
YYLVTLPELKTPAX

SEQ ID NO: 7787 - protein, 19 aa, Artificial Sequence
  Cyclic GFR-binding peptide
VKPKRGVYYLITLPELAQP

SEQ ID NO: 7788 - protein, 19 aa, Artificial Sequence
  Cyclic GFR-binding peptide
  MOD_RES (14), (14): Xaa is C or S
YYLVTLPELKTPAXTPKTV

SEQ ID NO: 7789 - protein, 15 aa, Artificial Sequence
  Cyclic GFR-binding peptide
  MOD_RES (14), (14): Xaa is C or S
YYVVPLPELKTPAXT

SEQ ID NO: 7790 - protein, 24 aa, Artificial Sequence
  Cyclic GFR-binding peptide
  MOD_RES (18), (18): Xaa is C or S
SSDDYYLVTLPELKTPAXTPKTVH

SEQ ID NO: 7791 - protein, 22 aa, Artificial Sequence
  Cyclic GFR-binding peptide
  MOD_RES (16), (17): Xaa is C or S
GVYYLITLPELAQPVXXPAASA

SEQ ID NO: 7792 - protein, 20 aa, Artificial Sequence
  Cyclic GFR-binding peptide
  MOD_RES (14), (15): Xaa is C or S
IFLISIPSLDQSVXXPSASA

SEQ ID NO: 7793 - protein, 18 aa, Artificial Sequence
  Cyclic GFR-binding peptide
VKPKRGVYYLITLPELAQ

SEQ ID NO: 7794 - protein, 22 aa, Artificial Sequence
  Cyclic GFR-binding peptide
  MOD_RES (16), (17): Xaa is C or S
EDYYVMPLPELETPVXXAKPIK

SEQ ID NO: 7795 - protein, 18 aa, Artificial Sequence
  Cyclic GFR-binding peptide
  MOD_RES (14), (15): Xaa is C or S
IFLISIPSLDQPVXXPSA

SEQ ID NO: 7796 - protein, 20 aa, Artificial Sequence
  Cyclic GFR-binding peptide
  MOD_RES (14), (14): Xaa is C or S
YYVVPLPELKTPAXTPKTVH

SEQ ID NO: 7797 - protein, 16 aa, Artificial Sequence
  Cyclic GFR-binding peptide
VKPKRGVIFLISIPSL

SEQ ID NO: 7798 - protein, 26 aa, Artificial Sequence
  Cyclic GFR-binding peptide
  MOD_RES (20), (21): Xaa is C or S
VKENEDYYVMPLPELETPVXXAKPIK

SEQ ID NO: 7799 - protein, 23 aa, Artificial Sequence
  Cyclic GFR-binding peptide
  MOD_RES (17), (18): Xaa is C or S
RGVIFLISIPSLDQPVXXPSASA

SEQ ID NO: 7800 - protein, 16 aa, Artificial Sequence
  Cyclic GFR-binding peptide
  MOD_RES (14), (15): Xaa is C or S
IFLISIPSLDQPVXXP

SEQ ID NO: 7801 - protein, 22 aa, Artificial Sequence
  Cyclic GFR-binding peptide
  MOD_RES (16), (17): Xaa is C or S
SDYYVIPLPELRTPVXXTPPTS

SEQ ID NO: 7802 - protein, 17 aa, Artificial Sequence
  Cyclic GFR-binding peptide
  MOD_RES (14), (15): Xaa is C or S
YYLMTLPELETPVXXAK

SEQ ID NO: 7803 - protein, 19 aa, Artificial Sequence
  Cyclic GFR-binding peptide
IKPTKGIIFLISIPSLDQS

SEQ ID NO: 7804 - protein, 22 aa, Artificial Sequence
  Cyclic GFR-binding peptide
  MOD_RES (16), (16): Xaa is C or S
DDYYVVPLPELKTPAXTPKTVH

SEQ ID NO: 7805 - protein, 25 aa, Artificial Sequence
  Cyclic GFR-binding peptide
  MOD_RES (19), (20): Xaa is C or S
KENEDYYLMTLPELETPVXXAKPIK

SEQ ID NO: 7806 - protein, 18 aa, Artificial Sequence
  Cyclic GFR-binding peptide
  MOD_RES (14), (15): Xaa is C or S
IFLISIPSLAQPVXXPAA

SEQ ID NO: 7807 - protein, 16 aa, Artificial Sequence
  Cyclic GFR-binding peptide
VVNNASDLYLISIASL

SEQ ID NO: 7808 - protein, 21 aa, Artificial Sequence
  Cyclic GFR-binding peptide
  MOD_RES (15), (16): Xaa is C or S
DYYVVPLPELKTPAXXPKPVY

SEQ ID NO: 7809 - protein, 16 aa, Artificial Sequence
  Cyclic GFR-binding peptide
VVKDYEDYYLMTLPEL

SEQ ID NO: 7810 - protein, 25 aa, Artificial Sequence
  Cyclic GFR-binding peptide
  MOD_RES (19), (20): Xaa is C or S
NNASDFYLISIANLRTPVXXTPPTS

SEQ ID NO: 7811 - protein, 25 aa, Artificial Sequence
  Cyclic GFR-binding peptide
  MOD_RES (19), (20): Xaa is C or S
KENEDYYVMPLPELETPVXXAKPIK

SEQ ID NO: 7812 - protein, 17 aa, Artificial Sequence
  Cyclic GFR-binding peptide
IVNSSDDYYVVPLPELQ

SEQ ID NO: 7813 - protein, 17 aa, Artificial Sequence
  Cyclic GFR-binding peptide
IKPTKGIYYVIPLPELD

SEQ ID NO: 7814 - protein, 27 aa, Artificial Sequence
  Cyclic GFR-binding peptide
  MOD_RES (21), (22): Xaa is C or S
VKPKRGVIFLISIPSLAQPVXXPAASA

SEQ ID NO: 7815 - protein, 17 aa, Artificial Sequence
  Cyclic GFR-binding peptide
IVNSSDDYYVVPLPELK

SEQ ID NO: 7816 - protein, 23 aa, Artificial Sequence
  Cyclic GFR-binding peptide
  MOD_RES (17), (18): Xaa is C or S
ASDYYVIPLPELRTPVXXTPPTS

SEQ ID NO: 7817 - protein, 15 aa, Artificial Sequence
  Cyclic GFR-binding peptide
IKPTKGIYYVIPLPE

SEQ ID NO: 7818 - protein, 27 aa, Artificial Sequence
  Cyclic GFR-binding peptide
  MOD_RES (21), (22): Xaa is C or S
VVNNASDYYVIPLPELRTPVXXTPPTS

SEQ ID NO: 7819 - protein, 21 aa, Artificial Sequence
  Cyclic GFR-binding peptide
  MOD_RES (15), (16): Xaa is C or S
DYYVVPLPELQTPAXXPKPVT

SEQ ID NO: 7820 - protein, 15 aa, Artificial Sequence
  Cyclic GFR-binding peptide
  MOD_RES (14), (15): Xaa is C or S
YYVIPLPELRTPVXX

SEQ ID NO: 7821 - protein, 24 aa, Artificial Sequence
  Cyclic GFR-binding peptide
  MOD_RES (18), (19): Xaa is C or S
NASDYYVIPLPELRTPVXXTPPTS

SEQ ID NO: 7822 - protein, 19 aa, Artificial Sequence
  Cyclic GFR-binding peptide
VVKDYEDYYLMTLPELETP

SEQ ID NO: 7823 - protein, 24 aa, Artificial Sequence
  Cyclic GFR-binding peptide
  MOD_RES (18), (19): Xaa is C or S
TRGVYYVIPLPELDQPVXXPSASA

SEQ ID NO: 7824 - protein, 25 aa, Artificial Sequence
  Cyclic GFR-binding peptide
  MOD_RES (19), (20): Xaa is C or S
PTRGVIFLISIPSLDQPVXXPSASA

SEQ ID NO: 7825 - protein, 27 aa, Artificial Sequence
  Cyclic GFR-binding peptide
  MOD_RES (21), (22): Xaa is C or S
VVKENEDYYLMTLPELETPVXXAKPIK

SEQ ID NO: 7826 - protein, 16 aa, Artificial Sequence
  Cyclic GFR-binding peptide
  MOD_RES (14), (15): Xaa is C or S
YYVIPLPELDQSVXXP

SEQ ID NO: 7827 - protein, 20 aa, Artificial Sequence
  Cyclic GFR-binding peptide
  MOD_RES (14), (15): Xaa is C or S
YYLMTLPELETPVXXAKPIS

SEQ ID NO: 7828 - protein, 22 aa, Artificial Sequence
  Cyclic GFR-binding peptide
  MOD_RES (16), (17): Xaa is C or S
EDYYLMTLPELETPVXXAKPIK

SEQ ID NO: 7829 - protein, 25 aa, Artificial Sequence
  Cyclic GFR-binding peptide
  MOD_RES (19), (20): Xaa is C or S
NSSDDYYLVTLPELQTPAXXPKPVT

SEQ ID NO: 7830 - protein, 18 aa, Artificial Sequence
  Cyclic GFR-binding peptide
VKPTRGVYYVIPLPELDQ

SEQ ID NO: 7831 - protein, 27 aa, Artificial Sequence
  Cyclic GFR-binding peptide
  MOD_RES (21), (22): Xaa is C or S
IVNSSDDIFLVSIPSLKTPAXXPKPVY

SEQ ID NO: 7832 - protein, 14 aa, Artificial Sequence
  Cyclic GFR-binding peptide
  MOD_RES (14), (14): Xaa is C or S
IFLVSIPSLKTPAX

SEQ ID NO: 7833 - protein, 27 aa, Artificial Sequence
  Cyclic GFR-binding peptide
  MOD_RES (21), (21): Xaa is C or S
IVNSSDDYYVVPLPELKTPAXTPKTVH

SEQ ID NO: 7834 - protein, 26 aa, Artificial Sequence
  Cyclic GFR-binding peptide
  MOD_RES (20), (21): Xaa is C or S
VNSSDDYYLVTLPELKTPAXXPKPVY

SEQ ID NO: 7835 - protein, 15 aa, Artificial Sequence
  Cyclic GFR-binding peptide
  MOD_RES (14), (15): Xaa is C or S
YYLITLPELRTPVXX

SEQ ID NO: 7836 - protein, 16 aa, Artificial Sequence
  Cyclic GFR-binding peptide
  MOD_RES (14), (15): Xaa is C or S
IFLVSIPSLQTPAXXP

SEQ ID NO: 7837 - protein, 19 aa, Artificial Sequence
  Cyclic GFR-binding peptide
  MOD_RES (14), (15): Xaa is C or S
IFLVSIPSLKTPAXXPKPV

SEQ ID NO: 7838 - protein, 24 aa, Artificial Sequence
  Cyclic GFR-binding peptide
  MOD_RES (18), (19): Xaa is C or S
ENEDYYVMPLPELETPVXXAKPIK

SEQ ID NO: 7839 - protein, 16 aa, Artificial Sequence
  Cyclic GFR-binding peptide
IVNSSDDYYVVPLPEL

SEQ ID NO: 7840 - protein, 26 aa, Artificial Sequence
  Cyclic GFR-binding peptide
  MOD_RES (20), (21): Xaa is C or S
VNNASDYYVIPLPELRTPVXXTPPTS

SEQ ID NO: 7841 - protein, 25 aa, Artificial Sequence
  Cyclic GFR-binding peptide
  MOD_RES (19), (20): Xaa is C or S
NNASDLYLISIASLRTPVXXTPPTS

SEQ ID NO: 7842 - protein, 19 aa, Artificial Sequence
  Cyclic GFR-binding peptide
  MOD_RES (14), (15): Xaa is C or S
YYVIPLPELRTPVXXTPPT

SEQ ID NO: 7843 - protein, 23 aa, Artificial Sequence
  Cyclic GFR-binding peptide
  MOD_RES (17), (18): Xaa is C or S
YEDYYLMTLPELETPVXXAKPIS

SEQ ID NO: 7844 - protein, 23 aa, Artificial Sequence
  Cyclic GFR-binding peptide
  MOD_RES (17), (18): Xaa is C or S
KGIYYVIPLPELDQSVXXPSASA

SEQ ID NO: 7845 - protein, 17 aa, Artificial Sequence
  Cyclic GFR-binding peptide
VVKDYEDYYLMTLPELE

SEQ ID NO: 7846 - protein, 15 aa, Artificial Sequence
  Cyclic GFR-binding peptide
  MOD_RES (14), (15): Xaa is C or S
IFLVSIPSLKTPAXX

SEQ ID NO: 7847 - protein, 23 aa, Artificial Sequence
  Cyclic GFR-binding peptide
  MOD_RES (17), (18): Xaa is C or S
YEDYYVMPLPELETPVXXAKPIS

SEQ ID NO: 7848 - protein, 21 aa, Artificial Sequence
  Cyclic GFR-binding peptide
  MOD_RES (15), (16): Xaa is C or S
VYYVIPLPELDQPVXXPSASA

SEQ ID NO: 7849 - protein, 19 aa, Artificial Sequence
  Cyclic GFR-binding peptide
VVNNASDFYLISIANLRTP

SEQ ID NO: 7850 - protein, 18 aa, Artificial Sequence
  Cyclic GFR-binding peptide
  MOD_RES (14), (15): Xaa is C or S
IFLVSIPSLKTPAXXPKP

SEQ ID NO: 7851 - protein, 22 aa, Artificial Sequence
  Cyclic GFR-binding peptide
  MOD_RES (16), (17): Xaa is C or S
GIYYVIPLPELDQSVXXPSASA

SEQ ID NO: 7852 - protein, 22 aa, Artificial Sequence
  Cyclic GFR-binding peptide
  MOD_RES (16), (16): Xaa is C or S
DDIFLVSIPSLKTPAXTPKTVH

SEQ ID NO: 7853 - protein, 18 aa, Artificial Sequence
  Cyclic GFR-binding peptide
  MOD_RES (14), (15): Xaa is C or S
IFLVSIPSLQTPAXXPKP

SEQ ID NO: 7854 - protein, 18 aa, Artificial Sequence
  Cyclic GFR-binding peptide
VVNNASDLYLISIASLRT

SEQ ID NO: 7855 - protein, 19 aa, Artificial Sequence
  Cyclic GFR-binding peptide
  MOD_RES (14), (14): Xaa is C or S
IFLVSIPSLKTPAXTPKTV

SEQ ID NO: 7856 - protein, 15 aa, Artificial Sequence
  Cyclic GFR-binding peptide
VVNNASDYYVIPLPE

SEQ ID NO: 7857 - protein, 21 aa, Artificial Sequence
  Cyclic GFR-binding peptide
  MOD_RES (15), (16): Xaa is C or S
DIFLMSIPSLETPVXXAKPIK

SEQ ID NO: 7858 - protein, 18 aa, Artificial Sequence
  Cyclic GFR-binding peptide
IVNSSDDYYLVTLPELQT

SEQ ID NO: 7859 - protein, 22 aa, Artificial Sequence
  Cyclic GFR-binding peptide
  MOD_RES (16), (17): Xaa is C or S
DDYYLVTLPELKTPAXXPKPVY

SEQ ID NO: 7860 - protein, 19 aa, Artificial Sequence
  Cyclic GFR-binding peptide
VVKENEDIFLMSIPSLETP

SEQ ID NO: 7861 - protein, 24 aa, Artificial Sequence
  Cyclic GFR-binding peptide
  MOD_RES (18), (19): Xaa is C or S
SSDDIFLVSIPSLQTPAXXPKPVT

SEQ ID NO: 7862 - protein, 23 aa, Artificial Sequence
  Cyclic GFR-binding peptide
  MOD_RES (17), (18): Xaa is C or S
RGVYYVIPLPELDQPVXXPSASA

SEQ ID NO: 7863 - protein, 18 aa, Artificial Sequence
  Cyclic GFR-binding peptide
IVNSSDDYYLVTLPELKT

SEQ ID NO: 7864 - protein, 21 aa, Artificial Sequence
  Cyclic GFR-binding peptide
  MOD_RES (15), (16): Xaa is C or S
DYYVMPLPELETPVXXAKPIS

SEQ ID NO: 7865 - protein, 13 aa, Artificial Sequence
  Cyclic GFR-binding peptide
YYVIPLPELRTPV

SEQ ID NO: 7866 - protein, 20 aa, Artificial Sequence
  Cyclic GFR-binding peptide
  MOD_RES (14), (15): Xaa is C or S
IFLMSIPSLETPVXXAKPIK

SEQ ID NO: 7867 - protein, 15 aa, Artificial Sequence
  Cyclic GFR-binding peptide
  MOD_RES (14), (14): Xaa is C or S
YYLVTLPELKTPAXT

SEQ ID NO: 7868 - protein, 25 aa, Artificial Sequence
  Cyclic GFR-binding peptide
  MOD_RES (19), (20): Xaa is C or S
NSSDDYYVVPLPELKTPAXXPKPVY

SEQ ID NO: 7869 - protein, 24 aa, Artificial Sequence
  Cyclic GFR-binding peptide
  MOD_RES (18), (19): Xaa is C or S
NASDFYLISIANLRTPVXXTPPTS

SEQ ID NO: 7870 - protein, 18 aa, Artificial Sequence
  Cyclic GFR-binding peptide
  MOD_RES (14), (15): Xaa is C or S
IFLISIPSLDQSVXXPSA

SEQ ID NO: 7871 - protein, 22 aa, Artificial Sequence
  Cyclic GFR-binding peptide
  MOD_RES (16), (17): Xaa is C or S
GVYYVIPLPELDQPVXXPSASA

SEQ ID NO: 7872 - protein, 17 aa, Artificial Sequence
  Cyclic GFR-binding peptide
VVKENEDIFLMSIPSLE

SEQ ID NO: 7873 - protein, 19 aa, Artificial Sequence
  Cyclic GFR-binding peptide
IKPTKGIYYVIPLPELDQS

SEQ ID NO: 7874 - protein, 18 aa, Artificial Sequence
  Cyclic GFR-binding peptide
  MOD_RES (14), (15): Xaa is C or S
YYLVTLPELKTPAXXPKP

SEQ ID NO: 7875 - protein, 18 aa, Artificial Sequence
  Cyclic GFR-binding peptide
VVKENEDYYVMPLPELET

SEQ ID NO: 7876 - protein, 21 aa, Artificial Sequence
  Cyclic GFR-binding peptide
  MOD_RES (15), (16): Xaa is C or S
DIFLVSIPSLQTPAXXPKPVT

SEQ ID NO: 7877 - protein, 20 aa, Artificial Sequence
  Cyclic GFR-binding peptide
  MOD_RES (14), (15): Xaa is C or S
IFLISIPSLAQPVXXPAASA

SEQ ID NO: 7878 - protein, 25 aa, Artificial Sequence
  Cyclic GFR-binding peptide
  MOD_RES (19), (20): Xaa is C or S
PTKGIYYVIPLPELDQSVXXPSASA

SEQ ID NO: 7879 - protein, 21 aa, Artificial Sequence
  Cyclic GFR-binding peptide
  MOD_RES (15), (16): Xaa is C or S
VIFLISIPSLAQPVXXPAASA

SEQ ID NO: 7880 - protein, 23 aa, Artificial Sequence
  Cyclic GFR-binding peptide
  MOD_RES (17), (18): Xaa is C or S
ASDFYLISIANLRTPVXXTPPTS

SEQ ID NO: 7881 - protein, 22 aa, Artificial Sequence
  Cyclic GFR-binding peptide
  MOD_RES (16), (17): Xaa is C or S
EDYYLMTLPELETPVXXAKPIS

SEQ ID NO: 7882 - protein, 13 aa, Artificial Sequence
  Cyclic GFR-binding peptide
YYLVTLPELQTPA

SEQ ID NO: 7883 - protein, 18 aa, Artificial Sequence
  Cyclic GFR-binding peptide
VVKDYEDIFLMSIPSLET

SEQ ID NO: 7884 - protein, 21 aa, Artificial Sequence
  Cyclic GFR-binding peptide
  MOD_RES (15), (16): Xaa is C or S
DYYVMPLPELETPVXXAKPIK

SEQ ID NO: 7885 - protein, 18 aa, Artificial Sequence
  Cyclic GFR-binding peptide
  MOD_RES (14), (15): Xaa is C or S
YYLITLPELRTPVXXTPP

SEQ ID NO: 7886 - protein, 18 aa, Artificial Sequence
  Cyclic GFR-binding peptide
  MOD_RES (14), (15): Xaa is C or S
YYVVPLPELKTPAXXPKP

SEQ ID NO: 7887 - protein, 13 aa, Artificial Sequence
  Cyclic GFR-binding peptide
YYLITLPELRTPV

SEQ ID NO: 7888 - protein, 20 aa, Artificial Sequence
  Cyclic GFR-binding peptide
  MOD_RES (14), (15): Xaa is C or S
IFLISIPSLDQPVXXPSASA

SEQ ID NO: 7889 - protein, 17 aa, Artificial Sequence
  Cyclic GFR-binding peptide
  MOD_RES (14), (15): Xaa is C or S
IFLVSIPSLKTPAXXPK

SEQ ID NO: 7890 - protein, 21 aa, Artificial Sequence
  Cyclic GFR-binding peptide
  MOD_RES (15), (16): Xaa is C or S
DIFLMSIPSLETPVXXAKPIS

SEQ ID NO: 7891 - protein, 19 aa, Artificial Sequence
  Cyclic GFR-binding peptide
VVKDYEDYYVMPLPELETP

SEQ ID NO: 7892 - protein, 26 aa, Artificial Sequence
  Cyclic GFR-binding peptide
  MOD_RES (20), (21): Xaa is C or S
KPTRGVYYVIPLPELDQPVXXPSASA

SEQ ID NO: 7893 - protein, 27 aa, Artificial Sequence
  Cyclic GFR-binding peptide
  MOD_RES (21), (22): Xaa is C or S
IKPTKGIYYVIPLPELDQSVXXPSASA

SEQ ID NO: 7894 - protein, 25 aa, Artificial Sequence
  Cyclic GFR-binding peptide
  MOD_RES (19), (20): Xaa is C or S
KENEDIFLMSIPSLETPVXXAKPIK

SEQ ID NO: 7895 - protein, 16 aa, Artificial Sequence
  Cyclic GFR-binding peptide
  MOD_RES (14), (15): Xaa is C or S
YYLITLPELAQPVXXP

SEQ ID NO: 7896 - protein, 21 aa, Artificial Sequence
  Cyclic GFR-binding peptide
  MOD_RES (15), (16): Xaa is C or S
DYYVIPLPELRTPVXXTPPTS

SEQ ID NO: 7897 - protein, 21 aa, Artificial Sequence
  Cyclic GFR-binding peptide
  MOD_RES (15), (16): Xaa is C or S
IYYVIPLPELDQSVXXPSASA

SEQ ID NO: 7898 - protein, 17 aa, Artificial Sequence
  Cyclic GFR-binding peptide
IVNSSDDIFLVSIPSLQ

SEQ ID NO: 7899 - protein, 17 aa, Artificial Sequence
  Cyclic GFR-binding peptide
IVNSSDDIFLVSIPSLK

SEQ ID NO: 7900 - protein, 22 aa, Artificial Sequence
  Cyclic GFR-binding peptide
  MOD_RES (16), (17): Xaa is C or S
EDIFLMSIPSLETPVXXAKPIS

SEQ ID NO: 7901 - protein, 27 aa, Artificial Sequence
  Cyclic GFR-binding peptide
  MOD_RES (21), (22): Xaa is C or S
VVKDYEDIFLMSIPSLETPVXXAKPIS

SEQ ID NO: 7902 - protein, 21 aa, Artificial Sequence
  Cyclic GFR-binding peptide
  MOD_RES (15), (16): Xaa is C or S
DLYLISIASLRTPVXXTPPTS

SEQ ID NO: 7903 - protein, 17 aa, Artificial Sequence
  Cyclic GFR-binding peptide
  MOD_RES (14), (15): Xaa is C or S
IFLMSIPSLETPVXXAK

SEQ ID NO: 7904 - protein, 16 aa, Artificial Sequence
  Cyclic GFR-binding peptide
VVKENEDYYLMTLPEL

SEQ ID NO: 7905 - protein, 17 aa, Artificial Sequence
  Cyclic GFR-binding peptide
  MOD_RES (14), (15): Xaa is C or S
YYVVPLPELKTPAXXPK

SEQ ID NO: 7906 - protein, 24 aa, Artificial Sequence
  Cyclic GFR-binding peptide
  MOD_RES (18), (18): Xaa is C or S
SSDDYYVVPLPELKTPAXTPKTVH

SEQ ID NO: 7907 - protein, 22 aa, Artificial Sequence
  Cyclic GFR-binding peptide
  MOD_RES (16), (17): Xaa is C or S
DDYYVVPLPELKTPAXXPKPVY

SEQ ID NO: 7908 - protein, 19 aa, Artificial Sequence
  Cyclic GFR-binding peptide
  MOD_RES (14), (15): Xaa is C or S
YYLITLPELRTPVXXTPPT

SEQ ID NO: 7909 - protein, 23 aa, Artificial Sequence
  Cyclic GFR-binding peptide
  MOD_RES (17), (18): Xaa is C or S
RGVIFLISIPSLAQPVXXPAASA

SEQ ID NO: 7910 - protein, 25 aa, Artificial Sequence
  Cyclic GFR-binding peptide
  MOD_RES (19), (20): Xaa is C or S
PTRGVYYVIPLPELDQPVXXPSASA

SEQ ID NO: 7911 - protein, 18 aa, Artificial Sequence
  Cyclic GFR-binding peptide
  MOD_RES (14), (15): Xaa is C or S
IFLMSIPSLETPVXXAKP

SEQ ID NO: 7912 - protein, 22 aa, Artificial Sequence
  Cyclic GFR-binding peptide
  MOD_RES (16), (17): Xaa is C or S
GVIFLISIPSLAQPVXXPAASA

SEQ ID NO: 7913 - protein, 18 aa, Artificial Sequence
  Cyclic GFR-binding peptide
  MOD_RES (14), (15): Xaa is C or S
FYLISIANLRTPVXXTPP

SEQ ID NO: 7914 - protein, 27 aa, Artificial Sequence
  Cyclic GFR-binding peptide
  MOD_RES (21), (22): Xaa is C or S
IVNSSDDYYVVPLPELKTPAXXPKPVY

SEQ ID NO: 7915 - protein, 22 aa, Artificial Sequence
  Cyclic GFR-binding peptide
  MOD_RES (16), (16): Xaa is C or S
DDYYLVTLPELKTPAXTPKTVH

SEQ ID NO: 7916 - protein, 17 aa, Artificial Sequence
  Cyclic GFR-binding peptide
  MOD_RES (14), (15): Xaa is C or S
YYLVTLPELKTPAXXPK

SEQ ID NO: 7917 - protein, 23 aa, Artificial Sequence
  Cyclic GFR-binding peptide
  MOD_RES (17), (18): Xaa is C or S
NEDYYVMPLPELETPVXXAKPIK

SEQ ID NO: 7918 - protein, 24 aa, Artificial Sequence
  Cyclic GFR-binding peptide
  MOD_RES (18), (19): Xaa is C or S
SSDDYYVVPLPELKTPAXXPKPVY

SEQ ID NO: 7919 - protein, 22 aa, Artificial Sequence
  Cyclic GFR-binding peptide
  MOD_RES (16), (17): Xaa is C or S
DDYYVVPLPELQTPAXXPKPVT

SEQ ID NO: 7920 - protein, 20 aa, Artificial Sequence
  Cyclic GFR-binding peptide
  MOD_RES (14), (15): Xaa is C or S
YYLITLPELAQPVXXPAASA

SEQ ID NO: 7921 - protein, 14 aa, Artificial Sequence
  Cyclic GFR-binding peptide
  MOD_RES (14), (14): Xaa is C or S
YYVIPLPELDQPVX

SEQ ID NO: 7922 - protein, 17 aa, Artificial Sequence
  Cyclic GFR-binding peptide
VVNNASDLYLISIASLR

SEQ ID NO: 7923 - protein, 18 aa, Artificial Sequence
  Cyclic GFR-binding peptide
  MOD_RES (14), (15): Xaa is C or S
YYLVTLPELQTPAXXPKP

SEQ ID NO: 7924 - protein, 15 aa, Artificial Sequence
  Cyclic GFR-binding peptide
  MOD_RES (14), (15): Xaa is C or S
IFLMSIPSLETPVXX

SEQ ID NO: 7925 - protein, 22 aa, Artificial Sequence
  Cyclic GFR-binding peptide
  MOD_RES (16), (17): Xaa is C or S
SDLYLISIASLRTPVXXTPPTS

SEQ ID NO: 7926 - protein, 19 aa, Artificial Sequence
  Cyclic GFR-binding peptide
VVKENEDYYVMPLPELETP

SEQ ID NO: 7927 - protein, 15 aa, Artificial Sequence
  Cyclic GFR-binding peptide
VKPKRGVIFLISIPS

SEQ ID NO: 7928 - protein, 17 aa, Artificial Sequence
  Cyclic GFR-binding peptide
  MOD_RES (14), (15): Xaa is C or S
LYLISIASLRTPVXXTP

SEQ ID NO: 7929 - protein, 19 aa, Artificial Sequence
  Cyclic GFR-binding peptide
  MOD_RES (14), (15): Xaa is C or S
FYLISIANLRTPVXXTPPT

SEQ ID NO: 7930 - protein, 19 aa, Artificial Sequence
  Cyclic GFR-binding peptide
IVNSSDDYYLVTLPELKTP

SEQ ID NO: 7931 - protein, 18 aa, Artificial Sequence
  Cyclic GFR-binding peptide
  MOD_RES (14), (15): Xaa is C or S
YYLITLPELAQPVXXPAA

SEQ ID NO: 7932 - protein, 19 aa, Artificial Sequence
  Cyclic GFR-binding peptide
IVNSSDDYYLVTLPELQTP

SEQ ID NO: 7933 - protein, 20 aa, Artificial Sequence
  Cyclic GFR-binding peptide
  MOD_RES (14), (15): Xaa is C or S
FYLISIANLRTPVXXTPPTS

SEQ ID NO: 7934 - protein, 13 aa, Artificial Sequence
  Cyclic GFR-binding peptide
FYLISIANLRTPV

SEQ ID NO: 7935 - protein, 27 aa, Artificial Sequence
  Cyclic GFR-binding peptide
  MOD_RES (21), (22): Xaa is C or S
VVKENEDYYVMPLPELETPVXXAKPIK

SEQ ID NO: 7936 - protein, 17 aa, Artificial Sequence
  Cyclic GFR-binding peptide
  MOD_RES (14), (15): Xaa is C or S
IFLISIPSLDQPVXXPS

SEQ ID NO: 7937 - protein, 18 aa, Artificial Sequence
  Cyclic GFR-binding peptide
IKPTKGIYYVIPLPELDQ

SEQ ID NO: 7938 - protein, 16 aa, Artificial Sequence
  Cyclic GFR-binding peptide
  MOD_RES (14), (15): Xaa is C or S
IFLISIPSLAQPVXXP

SEQ ID NO: 7939 - protein, 25 aa, Artificial Sequence
  Cyclic GFR-binding peptide
  MOD_RES (19), (20): Xaa is C or S
KDYEDIFLMSIPSLETPVXXAKPIS

SEQ ID NO: 7940 - protein, 25 aa, Artificial Sequence
  Cyclic GFR-binding peptide
  MOD_RES (19), (20): Xaa is C or S
NSSDDYYLVTLPELKTPAXXPKPVY

SEQ ID NO: 7941 - protein, 26 aa, Artificial Sequence
  Cyclic GFR-binding peptide
  MOD_RES (20), (21): Xaa is C or S
VKDYEDIFLMSIPSLETPVXXAKPIS

SEQ ID NO: 7942 - protein, 24 aa, Artificial Sequence
  Cyclic GFR-binding peptide
  MOD_RES (18), (19): Xaa is C or S
TKGIIFLISIPSLDQSVXXPSASA

SEQ ID NO: 7943 - protein, 19 aa, Artificial Sequence
  Cyclic GFR-binding peptide
VKPTRGVYYVIPLPELDQP

SEQ ID NO: 7944 - protein, 22 aa, Artificial Sequence
  Cyclic GFR-binding peptide
  MOD_RES (16), (17): Xaa is C or S
EDIFLMSIPSLETPVXXAKPIK

SEQ ID NO: 7945 - protein, 18 aa, Artificial Sequence
  Cyclic GFR-binding peptide
  MOD_RES (14), (14): Xaa is C or S
YYVVPLPELKTPAXTPKT

SEQ ID NO: 7946 - protein, 18 aa, Artificial Sequence
  Cyclic GFR-binding peptide
VVNNASDYYVIPLPELRT

SEQ ID NO: 7947 - protein, 16 aa, Artificial Sequence
  Cyclic GFR-binding peptide
VVKDYEDYYVMPLPEL

SEQ ID NO: 7948 - protein, 15 aa, Artificial Sequence
  Cyclic GFR-binding peptide
  MOD_RES (14), (15): Xaa is C or S
YYLITLPELAQPVXX

SEQ ID NO: 7949 - protein, 13 aa, Artificial Sequence
  Cyclic GFR-binding peptide
YYLVTLPELKTPA

SEQ ID NO: 7950 - protein, 14 aa, Artificial Sequence
  Cyclic GFR-binding peptide
  MOD_RES (14), (14): Xaa is C or S
YYLITLPELAQPVX

SEQ ID NO: 7951 - protein, 17 aa, Artificial Sequence
  Cyclic GFR-binding peptide
  MOD_RES (14), (15): Xaa is C or S
IFLISIPSLDQSVXXPS

SEQ ID NO: 7952 - protein, 25 aa, Artificial Sequence
  Cyclic GFR-binding peptide
  MOD_RES (19), (20): Xaa is C or S
NSSDDYYVVPLPELQTPAXXPKPVT

SEQ ID NO: 7953 - protein, 26 aa, Artificial Sequence
  Cyclic GFR-binding peptide
  MOD_RES (20), (21): Xaa is C or S
VNNASDYYLITLPELRTPVXXTPPTS

SEQ ID NO: 7954 - protein, 21 aa, Artificial Sequence
  Cyclic GFR-binding peptide
  MOD_RES (15), (16): Xaa is C or S
DYYLMTLPELETPVXXAKPIS

SEQ ID NO: 7955 - protein, 27 aa, Artificial Sequence
  Cyclic GFR-binding peptide
  MOD_RES (21), (22): Xaa is C or S
VVNNASDYYLITLPELRTPVXXTPPTS

SEQ ID NO: 7956 - protein, 19 aa, Artificial Sequence
  Cyclic GFR-binding peptide
VVNNASDYYLITLPELRTP

SEQ ID NO: 7957 - protein, 18 aa, Artificial Sequence
  Cyclic GFR-binding peptide
IVNSSDDYYVVPLPELKT

SEQ ID NO: 7958 - protein, 25 aa, Artificial Sequence
  Cyclic GFR-binding peptide
  MOD_RES (19), (20): Xaa is C or S
NSSDDIFLVSIPSLQTPAXXPKPVT

SEQ ID NO: 7959 - protein, 15 aa, Artificial Sequence
  Cyclic GFR-binding peptide
IKPTKGIIFLISIPS

SEQ ID NO: 7960 - protein, 23 aa, Artificial Sequence
  Cyclic GFR-binding peptide
  MOD_RES (17), (18): Xaa is C or S
ASDLYLISIASLRTPVXXTPPTS

SEQ ID NO: 7961 - protein, 18 aa, Artificial Sequence
  Cyclic GFR-binding peptide
  MOD_RES (14), (15): Xaa is C or S
YYVVPLPELQTPAXXPKP

SEQ ID NO: 7962 - protein, 16 aa, Artificial Sequence
  Cyclic GFR-binding peptide
IVNSSDDYYLVTLPEL

SEQ ID NO: 7963 - protein, 17 aa, Artificial Sequence
  Cyclic GFR-binding peptide
  MOD_RES (14), (15): Xaa is C or S
FYLISIANLRTPVXXTP

SEQ ID NO: 7964 - protein, 18 aa, Artificial Sequence
  Cyclic GFR-binding peptide
IVNSSDDYYVVPLPELQT

SEQ ID NO: 7965 - protein, 24 aa, Artificial Sequence
  Cyclic GFR-binding peptide
  MOD_RES (18), (19): Xaa is C or S
SSDDYYLVTLPELQTPAXXPKPVT

SEQ ID NO: 7966 - protein, 13 aa, Artificial Sequence
  Cyclic GFR-binding peptide
YYVVPLPELQTPA

SEQ ID NO: 7967 - protein, 16 aa, Artificial Sequence
  Cyclic GFR-binding peptide
  MOD_RES (14), (15): Xaa is C or S
IFLISIPSLDQSVXXP

SEQ ID NO: 7968 - protein, 21 aa, Artificial Sequence
  Cyclic GFR-binding peptide
  MOD_RES (15), (16): Xaa is C or S
DYYLVTLPELQTPAXXPKPVT

SEQ ID NO: 7969 - protein, 16 aa, Artificial Sequence
  Cyclic GFR-binding peptide
  MOD_RES (14), (15): Xaa is C or S
YYVMPLPELETPVXXA

SEQ ID NO: 7970 - protein, 18 aa, Artificial Sequence
  Cyclic GFR-binding peptide
  MOD_RES (14), (15): Xaa is C or S
LYLISIASLRTPVXXTPP

SEQ ID NO: 7971 - protein, 18 aa, Artificial Sequence
  Cyclic GFR-binding peptide
VKPTRGVIFLISIPSLDQ

SEQ ID NO: 7972 - protein, 14 aa, Artificial Sequence
  Cyclic GFR-binding peptide
  MOD_RES (14), (14): Xaa is C or S
IFLMSIPSLETPVX

SEQ ID NO: 7973 - protein, 14 aa, Artificial Sequence
  Cyclic GFR-binding peptide
  MOD_RES (14), (14): Xaa is C or S
IFLISIPSLAQPVX

SEQ ID NO: 7974 - protein, 13 aa, Artificial Sequence
  Cyclic GFR-binding peptide
YYVIPLPELDQPV

SEQ ID NO: 7975 - protein, 22 aa, Artificial Sequence
  Cyclic GFR-binding peptide
  MOD_RES (16), (17): Xaa is C or S
DDYYLVTLPELQTPAXXPKPVT

SEQ ID NO: 7976 - protein, 17 aa, Artificial Sequence
  Cyclic GFR-binding peptide
VVNNASDYYVIPLPELR

SEQ ID NO: 7977 - protein, 17 aa, Artificial Sequence
  Cyclic GFR-binding peptide
  MOD_RES (14), (15): Xaa is C or S
YYLVTLPELQTPAXXPK

SEQ ID NO: 7978 - protein, 18 aa, Artificial Sequence
  Cyclic GFR-binding peptide
  MOD_RES (14), (14): Xaa is C or S
YYLVTLPELKTPAXTPKT

SEQ ID NO: 7979 - protein, 16 aa, Artificial Sequence
  Cyclic GFR-binding peptide
  MOD_RES (14), (15): Xaa is C or S
YYVVPLPELKTPAXXP

SEQ ID NO: 7980 - protein, 15 aa, Artificial Sequence
  Cyclic GFR-binding peptide
VVKDYEDIFLMSIPS

SEQ ID NO: 7981 - protein, 13 aa, Artificial Sequence
  Cyclic GFR-binding peptide
LYLISIASLRTPV

SEQ ID NO: 7982 - protein, 16 aa, Artificial Sequence
  Cyclic GFR-binding peptide
  MOD_RES (14), (14): Xaa is C or S
YYLVTLPELKTPAXTP

SEQ ID NO: 7983 - protein, 19 aa, Artificial Sequence
  Cyclic GFR-binding peptide
  MOD_RES (14), (15): Xaa is C or S
IFLISIPSLDQPVXXPSAS

SEQ ID NO: 7984 - protein, 20 aa, Artificial Sequence
  Cyclic GFR-binding peptide
  MOD_RES (14), (15): Xaa is C or S
IFLVSIPSLKTPAXXPKPVY

SEQ ID NO: 7985 - protein, 16 aa, Artificial Sequence
  Cyclic GFR-binding peptide
  MOD_RES (14), (15): Xaa is C or S
IFLMSIPSLETPVXXA

SEQ ID NO: 7986 - protein, 13 aa, Artificial Sequence
  Cyclic GFR-binding peptide
YYLMTLPELETPV

SEQ ID NO: 7987 - protein, 15 aa, Artificial Sequence
  Cyclic GFR-binding peptide
  MOD_RES (14), (15): Xaa is C or S
YYLMTLPELETPVXX

SEQ ID NO: 7988 - protein, 24 aa, Artificial Sequence
  Cyclic GFR-binding peptide
  MOD_RES (18), (19): Xaa is C or S
KRGVYYLITLPELAQPVXXPAASA

SEQ ID NO: 7989 - protein, 15 aa, Artificial Sequence
  Cyclic GFR-binding peptide
  MOD_RES (14), (15): Xaa is C or S
IFLISIPSLDQSVXX

SEQ ID NO: 7990 - protein, 18 aa, Artificial Sequence
  Cyclic GFR-binding peptide
IVNSSDDIFLVSIPSLKT

SEQ ID NO: 7991 - protein, 17 aa, Artificial Sequence
  Cyclic GFR-binding peptide
  MOD_RES (14), (14): Xaa is C or S
IFLVSIPSLKTPAXTPK

SEQ ID NO: 7992 - protein, 17 aa, Artificial Sequence
  Cyclic GFR-binding peptide
  MOD_RES (14), (15): Xaa is C or S
YYVVPLPELQTPAXXPK

SEQ ID NO: 7993 - protein, 14 aa, Artificial Sequence
  Cyclic GFR-binding peptide
  MOD_RES (14), (14): Xaa is C or S
YYVVPLPELQTPAX

SEQ ID NO: 7994 - protein, 18 aa, Artificial Sequence
  Cyclic GFR-binding peptide
VVKENEDYYLMTLPELET

SEQ ID NO: 7995 - protein, 17 aa, Artificial Sequence
  Cyclic GFR-binding peptide
  MOD_RES (14), (14): Xaa is C or S
YYVVPLPELKTPAXTPK

SEQ ID NO: 7996 - protein, 18 aa, Artificial Sequence
  Cyclic GFR-binding peptide
IVNSSDDIFLVSIPSLQT

SEQ ID NO: 7997 - protein, 19 aa, Artificial Sequence
  Cyclic GFR-binding peptide
  MOD_RES (14), (15): Xaa is C or S
IFLMSIPSLETPVXXAKPI

SEQ ID NO: 7998 - protein, 26 aa, Artificial Sequence
  Cyclic GFR-binding peptide
  MOD_RES (20), (21): Xaa is C or S
VNSSDDYYVVPLPELQTPAXXPKPVT

SEQ ID NO: 7999 - protein, 19 aa, Artificial Sequence
  Cyclic GFR-binding peptide
  MOD_RES (14), (15): Xaa is C or S
LYLISIASLRTPVXXTPPT

SEQ ID NO: 8000 - protein, 16 aa, Artificial Sequence
  Cyclic GFR-binding peptide
  MOD_RES (14), (14): Xaa is C or S
YYVVPLPELKTPAXTP

SEQ ID NO: 8001 - protein, 17 aa, Artificial Sequence
  Cyclic GFR-binding peptide
  MOD_RES (14), (15): Xaa is C or S
YYVIPLPELDQSVXXPS

SEQ ID NO: 8002 - protein, 16 aa, Artificial Sequence
  Cyclic GFR-binding peptide
  MOD_RES (14), (15): Xaa is C or S
YYLVTLPELKTPAXXP

SEQ ID NO: 8003 - protein, 25 aa, Artificial Sequence
  Cyclic GFR-binding peptide
  MOD_RES (19), (19): Xaa is C or S
NSSDDYYLVTLPELKTPAXTPKTVH

SEQ ID NO: 8004 - protein, 23 aa, Artificial Sequence
  Cyclic GFR-binding peptide
  MOD_RES (17), (18): Xaa is C or S
SDDYYVVPLPELQTPAXXPKPVT

SEQ ID NO: 8005 - protein, 15 aa, Artificial Sequence
  Cyclic GFR-binding peptide
VVKENEDYYVMPLPE

SEQ ID NO: 8006 - protein, 19 aa, Artificial Sequence
  Cyclic GFR-binding peptide
  MOD_RES (14), (15): Xaa is C or S
IFLISIPSLAQPVXXPAAS

SEQ ID NO: 8007 - protein, 13 aa, Artificial Sequence
  Cyclic GFR-binding peptide
IFLISIPSLDQPV

SEQ ID NO: 8008 - protein, 13 aa, Artificial Sequence
  Cyclic GFR-binding peptide
IFLMSIPSLETPV

SEQ ID NO: 8009 - protein, 17 aa, Artificial Sequence
  Cyclic GFR-binding peptide
VVKDYEDIFLMSIPSLE

SEQ ID NO: 8010 - protein, 16 aa, Artificial Sequence
  Cyclic GFR-binding peptide
  MOD_RES (14), (15): Xaa is C or S
YYLITLPELRTPVXXT

SEQ ID NO: 8011 - protein, 26 aa, Artificial Sequence
  Cyclic GFR-binding peptide
  MOD_RES (20), (21): Xaa is C or S
KPKRGVYYLITLPELAQPVXXPAASA

SEQ ID NO: 8012 - protein, 21 aa, Artificial Sequence
  Cyclic GFR-binding peptide
  MOD_RES (15), (16): Xaa is C or S
IIFLISIPSLDQSVXXPSASA

SEQ ID NO: 8013 - protein, 16 aa, Artificial Sequence
  Cyclic GFR-binding peptide
  MOD_RES (14), (14): Xaa is C or S
IFLVSIPSLKTPAXTP

SEQ ID NO: 8014 - protein, 17 aa, Artificial Sequence
  Cyclic GFR-binding peptide
  MOD_RES (14), (14): Xaa is C or S
YYLVTLPELKTPAXTPK

SEQ ID NO: 8015 - protein, 14 aa, Artificial Sequence
  Cyclic GFR-binding peptide
  MOD_RES (14), (14): Xaa is C or S
IFLISIPSLDQSVX

SEQ ID NO: 8016 - protein, 17 aa, Artificial Sequence
  Cyclic GFR-binding peptide
VVKENEDYYVMPLPELE

SEQ ID NO: 8017 - protein, 18 aa, Artificial Sequence
  Cyclic GFR-binding peptide
VKPKRGVIFLISIPSLAQ

SEQ ID NO: 8018 - protein, 16 aa, Artificial Sequence
  Cyclic GFR-binding peptide
  MOD_RES (14), (15): Xaa is C or S
YYLMTLPELETPVXXA

SEQ ID NO: 8019 - protein, 16 aa, Artificial Sequence
  Cyclic GFR-binding peptide
VKPTRGVYYVIPLPEL

SEQ ID NO: 8020 - protein, 25 aa, Artificial Sequence
  Cyclic GFR-binding peptide
  MOD_RES (19), (20): Xaa is C or S
KDYEDYYVMPLPELETPVXXAKPIS

SEQ ID NO: 8021 - protein, 14 aa, Artificial Sequence
  Cyclic GFR-binding peptide
  MOD_RES (14), (14): Xaa is C or S
YYLVTLPELQTPAX

SEQ ID NO: 8022 - protein, 15 aa, Artificial Sequence
  Cyclic GFR-binding peptide
  MOD_RES (14), (15): Xaa is C or S
YYVIPLPELDQPVXX

SEQ ID NO: 8023 - protein, 13 aa, Artificial Sequence
  Cyclic GFR-binding peptide
IFLISIPSLDQSV

SEQ ID NO: 8024 - protein, 19 aa, Artificial Sequence
  Cyclic GFR-binding peptide
  MOD_RES (14), (15): Xaa is C or S
YYLMTLPELETPVXXAKPI

SEQ ID NO: 8025 - protein, 15 aa, Artificial Sequence
  Cyclic GFR-binding peptide
  MOD_RES (14), (15): Xaa is C or S
IFLISIPSLAQPVXX

SEQ ID NO: 8026 - protein, 26 aa, Artificial Sequence
  Cyclic GFR-binding peptide
  MOD_RES (20), (21): Xaa is C or S
KPTKGIIFLISIPSLDQSVXXPSASA

SEQ ID NO: 8027 - protein, 19 aa, Artificial Sequence
  Cyclic GFR-binding peptide
VVKENEDYYLMTLPELETP

SEQ ID NO: 8028 - protein, 27 aa, Artificial Sequence
  Cyclic GFR-binding peptide
  MOD_RES (21), (22): Xaa is C or S
IKPTKGIIFLISIPSLDQSVXXPSASA

SEQ ID NO: 8029 - protein, 23 aa, Artificial Sequence
  Cyclic GFR-binding peptide
  MOD_RES (17), (18): Xaa is C or S
NEDIFLMSIPSLETPVXXAKPIK

SEQ ID NO: 8030 - protein, 16 aa, Artificial Sequence
  Cyclic GFR-binding peptide
  MOD_RES (14), (15): Xaa is C or S
IFLVSIPSLKTPAXXP

SEQ ID NO: 8031 - protein, 17 aa, Artificial Sequence
  Cyclic GFR-binding peptide
  MOD_RES (14), (15): Xaa is C or S
YYLITLPELAQPVXXPA

SEQ ID NO: 8032 - protein, 19 aa, Artificial Sequence
  Cyclic GFR-binding peptide
  MOD_RES (14), (15): Xaa is C or S
YYVIPLPELDQPVXXPSAS

SEQ ID NO: 8033 - protein, 27 aa, Artificial Sequence
  Cyclic GFR-binding peptide
  MOD_RES (21), (22): Xaa is C or S
IVNSSDDYYLVTLPELKTPAXXPKPVY

SEQ ID NO: 8034 - protein, 19 aa, Artificial Sequence
  Cyclic GFR-binding peptide
VVKDYEDIFLMSIPSLETP

SEQ ID NO: 8035 - protein, 26 aa, Artificial Sequence
  Cyclic GFR-binding peptide
  MOD_RES (20), (21): Xaa is C or S
VKENEDYYLMTLPELETPVXXAKPIK

SEQ ID NO: 8036 - protein, 14 aa, Artificial Sequence
  Cyclic GFR-binding peptide
  MOD_RES (14), (14): Xaa is C or S
IFLVSIPSLQTPAX

SEQ ID NO: 8037 - protein, 19 aa, Artificial Sequence
  Cyclic GFR-binding peptide
  MOD_RES (14), (15): Xaa is C or S
IFLVSIPSLQTPAXXPKPV

SEQ ID NO: 8038 - protein, 17 aa, Artificial Sequence
  Cyclic GFR-binding peptide
IKPTKGIIFLISIPSLD

SEQ ID NO: 8039 - protein, 20 aa, Artificial Sequence
  Cyclic GFR-binding peptide
  MOD_RES (14), (15): Xaa is C or S
IFLVSIPSLQTPAXXPKPVT

SEQ ID NO: 8040 - protein, 14 aa, Artificial Sequence
  Cyclic GFR-binding peptide
  MOD_RES (14), (14): Xaa is C or S
YYVIPLPELDQSVX

SEQ ID NO: 8041 - protein, 24 aa, Artificial Sequence
  Cyclic GFR-binding peptide
  MOD_RES (18), (18): Xaa is C or S
SSDDIFLVSIPSLKTPAXTPKTVH

SEQ ID NO: 8042 - protein, 13 aa, Artificial Sequence
  Cyclic GFR-binding peptide
YYVMPLPELETPV

SEQ ID NO: 8043 - protein, 15 aa, Artificial Sequence
  Cyclic GFR-binding peptide
  MOD_RES (14), (15): Xaa is C or S
YYVMPLPELETPVXX

SEQ ID NO: 8044 - protein, 27 aa, Artificial Sequence
  Cyclic GFR-binding peptide
  MOD_RES (21), (21): Xaa is C or S
IVNSSDDIFLVSIPSLKTPAXTPKTVH

SEQ ID NO: 8045 - protein, 23 aa, Artificial Sequence
  Cyclic GFR-binding peptide
  MOD_RES (17), (17): Xaa is C or S
SDDYYVVPLPELKTPAXTPKTVH

SEQ ID NO: 8046 - protein, 13 aa, Artificial Sequence
  Cyclic GFR-binding peptide
IFLVSIPSLQTPA

SEQ ID NO: 8047 - protein, 18 aa, Artificial Sequence
  Cyclic GFR-binding peptide
IKPTKGIIFLISIPSLDQ

SEQ ID NO: 8048 - protein, 25 aa, Artificial Sequence
  Cyclic GFR-binding peptide
  MOD_RES (19), (20): Xaa is C or S
PKRGVIFLISIPSLAQPVXXPAASA

SEQ ID NO: 8049 - protein, 21 aa, Artificial Sequence
  Cyclic GFR-binding peptide
  MOD_RES (15), (16): Xaa is C or S
DFYLISIANLRTPVXXTPPTS

SEQ ID NO: 8050 - protein, 16 aa, Artificial Sequence
  Cyclic GFR-binding peptide
VVKENEDYYVMPLPEL

SEQ ID NO: 8051 - protein, 16 aa, Artificial Sequence
  Cyclic GFR-binding peptide
VVKDYEDIFLMSIPSL

SEQ ID NO: 8052 - protein, 13 aa, Artificial Sequence
  Cyclic GFR-binding peptide
YYVIPLPELDQSV

SEQ ID NO: 8053 - protein, 26 aa, Artificial Sequence
  Cyclic GFR-binding peptide
  MOD_RES (20), (21): Xaa is C or S
KPTRGVIFLISIPSLDQPVXXPSASA

SEQ ID NO: 8054 - protein, 19 aa, Artificial Sequence
  Cyclic GFR-binding peptide
  MOD_RES (14), (15): Xaa is C or S
YYLVTLPELQTPAXXPKPV

SEQ ID NO: 8055 - protein, 14 aa, Artificial Sequence
  Cyclic GFR-binding peptide
  MOD_RES (14), (14): Xaa is C or S
YYLMTLPELETPVX

SEQ ID NO: 8056 - protein, 27 aa, Artificial Sequence
  Cyclic GFR-binding peptide
  MOD_RES (21), (22): Xaa is C or S
VKPTRGVYYVIPLPELDQPVXXPSASA

SEQ ID NO: 8057 - protein, 20 aa, Artificial Sequence
  Cyclic GFR-binding peptide
  MOD_RES (14), (15): Xaa is C or S
YYLVTLPELKTPAXXPKPVY

SEQ ID NO: 8058 - protein, 14 aa, Artificial Sequence
  Cyclic GFR-binding peptide
  MOD_RES (14), (14): Xaa is C or S
YYVMPLPELETPVX

SEQ ID NO: 8059 - protein, 25 aa, Artificial Sequence
  Cyclic GFR-binding peptide
  MOD_RES (19), (20): Xaa is C or S
KDYEDYYLMTLPELETPVXXAKPIS

SEQ ID NO: 8060 - protein, 17 aa, Artificial Sequence
  Cyclic GFR-binding peptide
  MOD_RES (14), (15): Xaa is C or S
YYVIPLPELDQPVXXPS

SEQ ID NO: 8061 - protein, 13 aa, Artificial Sequence
  Cyclic GFR-binding peptide
IFLISIPSLAQPV

SEQ ID NO: 8062 - protein, 17 aa, Artificial Sequence
  Cyclic GFR-binding peptide
VVNNASDFYLISIANLR

SEQ ID NO: 8063 - protein, 16 aa, Artificial Sequence
  Cyclic GFR-binding peptide
  MOD_RES (14), (15): Xaa is C or S
FYLISIANLRTPVXXT

SEQ ID NO: 8064 - protein, 17 aa, Artificial Sequence
  Cyclic GFR-binding peptide
VKPKRGVIFLISIPSLA

SEQ ID NO: 8065 - protein, 15 aa, Artificial Sequence
  Cyclic GFR-binding peptide
  MOD_RES (14), (15): Xaa is C or S
YYVIPLPELDQSVXX

SEQ ID NO: 8066 - protein, 18 aa, Artificial Sequence
  Cyclic GFR-binding peptide
VVNNASDYYLITLPELRT

SEQ ID NO: 8067 - protein, 20 aa, Artificial Sequence
  Cyclic GFR-binding peptide
  MOD_RES (14), (15): Xaa is C or S
YYLVTLPELQTPAXXPKPVT

SEQ ID NO: 8068 - protein, 26 aa, Artificial Sequence
  Cyclic GFR-binding peptide
  MOD_RES (20), (20): Xaa is C or S
VNSSDDYYVVPLPELKTPAXTPKTVH

SEQ ID NO: 8069 - protein, 19 aa, Artificial Sequence
  Cyclic GFR-binding peptide
VKPTRGVIFLISIPSLDQP

SEQ ID NO: 8070 - protein, 16 aa, Artificial Sequence
  Cyclic GFR-binding peptide
VVKENEDIFLMSIPSL

SEQ ID NO: 8071 - protein, 15 aa, Artificial Sequence
  Cyclic GFR-binding peptide
  MOD_RES (14), (15): Xaa is C or S
IFLISIPSLDQPVXX

SEQ ID NO: 8072 - protein, 19 aa, Artificial Sequence
  Cyclic GFR-binding peptide
  MOD_RES (14), (15): Xaa is C or S
YYLITLPELAQPVXXPAAS

SEQ ID NO: 8073 - protein, 14 aa, Artificial Sequence
  Cyclic GFR-binding peptide
  MOD_RES (14), (14): Xaa is C or S
IFLISIPSLDQPVX

SEQ ID NO: 8074 - protein, 19 aa, Artificial Sequence
  Cyclic GFR-binding peptide
VKPKRGVIFLISIPSLAQP

SEQ ID NO: 8075 - protein, 22 aa, Artificial Sequence
  Cyclic GFR-binding peptide
  MOD_RES (16), (17): Xaa is C or S
SDFYLISIANLRTPVXXTPPTS

SEQ ID NO: 8076 - protein, 17 aa, Artificial Sequence
  Cyclic GFR-binding peptide
  MOD_RES (14), (15): Xaa is C or S
YYLITLPELRTPVXXTP

SEQ ID NO: 8077 - protein, 16 aa, Artificial Sequence
  Cyclic GFR-binding peptide
VVNNASDYYLITLPEL

SEQ ID NO: 8078 - protein, 23 aa, Artificial Sequence
  Cyclic GFR-binding peptide
  MOD_RES (17), (17): Xaa is C or S
SDDIFLVSIPSLKTPAXTPKTVH

SEQ ID NO: 8079 - protein, 24 aa, Artificial Sequence
  Cyclic GFR-binding peptide
  MOD_RES (18), (19): Xaa is C or S
TKGIYYVIPLPELDQSVXXPSASA

SEQ ID NO: 8080 - protein, 21 aa, Artificial Sequence
  Cyclic GFR-binding peptide
  MOD_RES (15), (15): Xaa is C or S
DYYLVTLPELKTPAXTPKTVH

SEQ ID NO: 8081 - protein, 25 aa, Artificial Sequence
  Cyclic GFR-binding peptide
  MOD_RES (19), (20): Xaa is C or S
NSSDDIFLVSIPSLKTPAXXPKPVY

SEQ ID NO: 8082 - protein, 21 aa, Artificial Sequence
  Cyclic GFR-binding peptide
  MOD_RES (15), (16): Xaa is C or S
VIFLISIPSLDQPVXXPSASA

SEQ ID NO: 8083 - protein, 18 aa, Artificial Sequence
  Cyclic GFR-binding peptide
  MOD_RES (14), (15): Xaa is C or S
YYVIPLPELRTPVXXTPP

SEQ ID NO: 8084 - protein, 19 aa, Artificial Sequence
  Cyclic GFR-binding peptide
VVNNASDYYVIPLPELRTP

SEQ ID NO: 8085 - protein, 15 aa, Artificial Sequence
  Cyclic GFR-binding peptide
  MOD_RES (14), (15): Xaa is C or S
IFLVSIPSLQTPAXX

SEQ ID NO: 8086 - protein, 15 aa, Artificial Sequence
  Cyclic GFR-binding peptide
VVKENEDYYLMTLPE

SEQ ID NO: 8087 - protein, 24 aa, Artificial Sequence
  Cyclic GFR-binding peptide
  MOD_RES (18), (19): Xaa is C or S
NASDYYLITLPELRTPVXXTPPTS

SEQ ID NO: 8088 - protein, 23 aa, Artificial Sequence
  Cyclic GFR-binding peptide
  MOD_RES (17), (18): Xaa is C or S
RGVYYLITLPELAQPVXXPAASA

SEQ ID NO: 8089 - protein, 25 aa, Artificial Sequence
  Cyclic GFR-binding peptide
  MOD_RES (19), (20): Xaa is C or S
PTKGIIFLISIPSLDQSVXXPSASA

SEQ ID NO: 8090 - protein, 16 aa, Artificial Sequence
  Cyclic GFR-binding peptide
  MOD_RES (14), (15): Xaa is C or S
LYLISIASLRTPVXXT

SEQ ID NO: 8091 - protein, 18 aa, Artificial Sequence
  Cyclic GFR-binding peptide
  MOD_RES (14), (14): Xaa is C or S
IFLVSIPSLKTPAXTPKT

SEQ ID NO: 8092 - protein, 19 aa, Artificial Sequence
  Cyclic GFR-binding peptide
  MOD_RES (14), (15): Xaa is C or S
YYVMPLPELETPVXXAKPI

SEQ ID NO: 8093 - protein, 24 aa, Artificial Sequence
  Cyclic GFR-binding peptide
  MOD_RES (18), (19): Xaa is C or S
DYEDYYLMTLPELETPVXXAKPIS

SEQ ID NO: 8094 - protein, 16 aa, Artificial Sequence
  Cyclic GFR-binding peptide
VKPKRGVYYLITLPEL

SEQ ID NO: 8095 - protein, 17 aa, Artificial Sequence
  Cyclic GFR-binding peptide
VKPTRGVIFLISIPSLD

SEQ ID NO: 8096 - protein, 19 aa, Artificial Sequence
  Cyclic GFR-binding peptide
  MOD_RES (14), (15): Xaa is C or S
YYVIPLPELDQSVXXPSAS

SEQ ID NO: 8097 - protein, 18 aa, Artificial Sequence
  Cyclic GFR-binding peptide
VVKDYEDYYVMPLPELET

SEQ ID NO: 8098 - protein, 27 aa, Artificial Sequence
  Cyclic GFR-binding peptide
  MOD_RES (21), (22): Xaa is C or S
IVNSSDDYYLVTLPELQTPAXXPKPVT

SEQ ID NO: 8099 - protein, 17 aa, Artificial Sequence
  Cyclic GFR-binding peptide
  MOD_RES (14), (15): Xaa is C or S
IFLVSIPSLQTPAXXPK

SEQ ID NO: 8100 - protein, 20 aa, Artificial Sequence
  Cyclic GFR-binding peptide
  MOD_RES (14), (15): Xaa is C or S
YYVVPLPELKTPAXXPKPVY

SEQ ID NO: 8101 - protein, 27 aa, Artificial Sequence
  Cyclic GFR-binding peptide
  MOD_RES (21), (22): Xaa is C or S
VVKENEDIFLMSIPSLETPVXXAKPIK

SEQ ID NO: 8102 - protein, 27 aa, Artificial Sequence
  Cyclic GFR-binding peptide
  MOD_RES (21), (22): Xaa is C or S
VVNNASDFYLISIANLRTPVXXTPPTS

SEQ ID NO: 8103 - protein, 26 aa, Artificial Sequence
  Cyclic GFR-binding peptide
  MOD_RES (20), (21): Xaa is C or S
KPTKGIYYVIPLPELDQSVXXPSASA

SEQ ID NO: 8104 - protein, 20 aa, Artificial Sequence
  Cyclic GFR-binding peptide
  MOD_RES (14), (15): Xaa is C or S
YYLITLPELRTPVXXTPPTS

SEQ ID NO: 8105 - protein, 24 aa, Artificial Sequence
  Cyclic GFR-binding peptide
  MOD_RES (18), (19): Xaa is C or S
ENEDIFLMSIPSLETPVXXAKPIK

SEQ ID NO: 8106 - protein, 25 aa, Artificial Sequence
  Cyclic GFR-binding peptide
  MOD_RES (19), (20): Xaa is C or S
NNASDYYLITLPELRTPVXXTPPTS

SEQ ID NO: 8107 - protein, 22 aa, Artificial Sequence
  Cyclic GFR-binding peptide
  MOD_RES (16), (17): Xaa is C or S
GIIFLISIPSLDQSVXXPSASA

SEQ ID NO: 8108 - protein, 23 aa, Artificial Sequence
  Cyclic GFR-binding peptide
  MOD_RES (17), (18): Xaa is C or S
NEDYYLMTLPELETPVXXAKPIK

SEQ ID NO: 8109 - protein, 26 aa, Artificial Sequence
  Cyclic GFR-binding peptide
  MOD_RES (20), (21): Xaa is C or S
VNNASDFYLISIANLRTPVXXTPPTS

SEQ ID NO: 8110 - protein, 18 aa, Artificial Sequence
  Cyclic GFR-binding peptide
  MOD_RES (14), (15): Xaa is C or S
YYVMPLPELETPVXXAKP

SEQ ID NO: 8111 - protein, 23 aa, Artificial Sequence
  Cyclic GFR-binding peptide
  MOD_RES (17), (18): Xaa is C or S
YEDIFLMSIPSLETPVXXAKPIS

SEQ ID NO: 8112 - protein, 21 aa, Artificial Sequence
  Cyclic GFR-binding peptide
  MOD_RES (15), (16): Xaa is C or S
DYYLMTLPELETPVXXAKPIK

SEQ ID NO: 8113 - protein, 18 aa, Artificial Sequence
  Cyclic GFR-binding peptide
  MOD_RES (14), (15): Xaa is C or S
YYVIPLPELDQSVXXPSA

SEQ ID NO: 8114 - protein, 17 aa, Artificial Sequence
  Cyclic GFR-binding peptide
VVKENEDYYLMTLPELE

SEQ ID NO: 8115 - protein, 23 aa, Artificial Sequence
  Cyclic GFR-binding peptide
  MOD_RES (17), (17): Xaa is C or S
SDDYYLVTLPELKTPAXTPKTVH

SEQ ID NO: 8116 - protein, 27 aa, Artificial Sequence
  Cyclic GFR-binding peptide
  MOD_RES (21), (22): Xaa is C or S
VVNNASDLYLISIASLRTPVXXTPPTS

SEQ ID NO: 8117 - protein, 15 aa, Artificial Sequence
  Cyclic GFR-binding peptide
IVNSSDDIFLVSIPS

SEQ ID NO: 8118 - protein, 23 aa, Artificial Sequence
  Cyclic GFR-binding peptide
  MOD_RES (17), (18): Xaa is C or S
ASDYYLITLPELRTPVXXTPPTS

SEQ ID NO: 8119 - protein, 13 aa, Artificial Sequence
  Cyclic GFR-binding peptide
YYLITLPELAQPV

SEQ ID NO: 8120 - protein, 17 aa, Artificial Sequence
  Cyclic GFR-binding peptide
  MOD_RES (14), (15): Xaa is C or S
YYVIPLPELRTPVXXTP

SEQ ID NO: 8121 - protein, 15 aa, Artificial Sequence
  Cyclic GFR-binding peptide
VKPTRGVYYVIPLPE

SEQ ID NO: 8122 - protein, 15 aa, Artificial Sequence
  Cyclic GFR-binding peptide
VVKDYEDYYVMPLPE

SEQ ID NO: 8123 - protein, 26 aa, Artificial Sequence
  Cyclic GFR-binding peptide
  MOD_RES (20), (21): Xaa is C or S
VKENEDIFLMSIPSLETPVXXAKPIK

SEQ ID NO: 8124 - protein, 16 aa, Artificial Sequence
  Cyclic GFR-binding peptide
VVNNASDYYVIPLPEL

SEQ ID NO: 8125 - protein, 15 aa, Artificial Sequence
  Cyclic GFR-binding peptide
IVNSSDDYYLVTLPE

SEQ ID NO: 8126 - protein, 19 aa, Artificial Sequence
  Cyclic GFR-binding peptide
VVNNASDLYLISIASLRTP

SEQ ID NO: 8127 - protein, 24 aa, Artificial Sequence
  Cyclic GFR-binding peptide
  MOD_RES (18), (19): Xaa is C or S
DYEDYYVMPLPELETPVXXAKPIS

SEQ ID NO: 8128 - protein, 18 aa, Artificial Sequence
  Cyclic GFR-binding peptide
  MOD_RES (14), (15): Xaa is C or S
YYLMTLPELETPVXXAKP

SEQ ID NO: 8129 - protein, 17 aa, Artificial Sequence
  Cyclic GFR-binding peptide
  MOD_RES (14), (15): Xaa is C or S
IFLISIPSLAQPVXXPA

SEQ ID NO: 8130 - protein, 20 aa, Artificial Sequence
  Cyclic GFR-binding peptide
  MOD_RES (14), (15): Xaa is C or S
YYVIPLPELDQPVXXPSASA

SEQ ID NO: 8131 - protein, 14 aa, Artificial Sequence
  Cyclic GFR-binding peptide
  MOD_RES (14), (14): Xaa is C or S
FYLISIANLRTPVX

SEQ ID NO: 8132 - protein, 26 aa, Artificial Sequence
  Cyclic GFR-binding peptide
  MOD_RES (20), (21): Xaa is C or S
VKDYEDYYVMPLPELETPVXXAKPIS

SEQ ID NO: 8133 - protein, 24 aa, Artificial Sequence
  Cyclic GFR-binding peptide
  MOD_RES (18), (19): Xaa is C or S
TRGVIFLISIPSLDQPVXXPSASA

SEQ ID NO: 8134 - protein, 14 aa, Artificial Sequence
  Cyclic GFR-binding peptide
  MOD_RES (14), (14): Xaa is C or S
LYLISIASLRTPVX

SEQ ID NO: 8135 - protein, 19 aa, Artificial Sequence
  Cyclic GFR-binding peptide
IVNSSDDIFLVSIPSLKTP

SEQ ID NO: 8136 - protein, 21 aa, Artificial Sequence
  Cyclic GFR-binding peptide
  MOD_RES (15), (16): Xaa is C or S
VYYLITLPELAQPVXXPAASA

SEQ ID NO: 8137 - protein, 20 aa, Artificial Sequence
  Cyclic GFR-binding peptide
  MOD_RES (14), (15): Xaa is C or S
YYVIPLPELRTPVXXTPPTS

SEQ ID NO: 8138 - protein, 23 aa, Artificial Sequence
  Cyclic GFR-binding peptide
  MOD_RES (17), (18): Xaa is C or S
SDDYYLVTLPELQTPAXXPKPVT

SEQ ID NO: 8139 - protein, 26 aa, Artificial Sequence
  Cyclic GFR-binding peptide
  MOD_RES (20), (21): Xaa is C or S
VKDYEDYYLMTLPELETPVXXAKPIS

SEQ ID NO: 8140 - protein, 19 aa, Artificial Sequence
  Cyclic GFR-binding peptide
IVNSSDDIFLVSIPSLQTP

SEQ ID NO: 8141 - protein, 24 aa, Artificial Sequence
  Cyclic GFR-binding peptide
  MOD_RES (18), (19): Xaa is C or S
ENEDYYLMTLPELETPVXXAKPIK

SEQ ID NO: 8142 - protein, 21 aa, Artificial Sequence
  Cyclic GFR-binding peptide
  MOD_RES (15), (16): Xaa is C or S
DIFLVSIPSLKTPAXXPKPVY

SEQ ID NO: 8143 - protein, 15 aa, Artificial Sequence
  Cyclic GFR-binding peptide
VVKENEDIFLMSIPS

SEQ ID NO: 8144 - protein, 23 aa, Artificial Sequence
  Cyclic GFR-binding peptide
  MOD_RES (17), (18): Xaa is C or S
SDDYYLVTLPELKTPAXXPKPVY

SEQ ID NO: 8145 - protein, 26 aa, Artificial Sequence
  Cyclic GFR-binding peptide
  MOD_RES (20), (21): Xaa is C or S
VNNASDLYLISIASLRTPVXXTPPTS

SEQ ID NO: 8146 - protein, 17 aa, Artificial Sequence
  Cyclic GFR-binding peptide
  MOD_RES (14), (15): Xaa is C or S
YYVMPLPELETPVXXAK

SEQ ID NO: 8147 - protein, 26 aa, Artificial Sequence
  Cyclic GFR-binding peptide
  MOD_RES (20), (21): Xaa is C or S
VNSSDDIFLVSIPSLQTPAXXPKPVT

SEQ ID NO: 8148 - protein, 15 aa, Artificial Sequence
  Cyclic GFR-binding peptide
  MOD_RES (14), (15): Xaa is C or S
YYVVPLPELQTPAXX

SEQ ID NO: 8149 - protein, 27 aa, Artificial Sequence
  Cyclic GFR-binding peptide
  MOD_RES (21), (22): Xaa is C or S
VKPKRGVYYLITLPELAQPVXXPAASA

SEQ ID NO: 8150 - protein, 19 aa, Artificial Sequence
  Cyclic GFR-binding peptide
  MOD_RES (14), (15): Xaa is C or S
IFLISIPSLDQSVXXPSAS

SEQ ID NO: 8151 - protein, 16 aa, Artificial Sequence
  Cyclic GFR-binding peptide
VKPTRGVIFLISIPSL

SEQ ID NO: 8152 - protein, 27 aa, Artificial Sequence
  Cyclic GFR-binding peptide
  MOD_RES (21), (22): Xaa is C or S
IVNSSDDYYVVPLPELQTPAXXPKPVT

SEQ ID NO: 8153 - protein, 20 aa, Artificial Sequence
  Cyclic GFR-binding peptide
  MOD_RES (14), (15): Xaa is C or S
YYVVPLPELQTPAXXPKPVT

SEQ ID NO: 8154 - protein, 16 aa, Artificial Sequence
  Cyclic GFR-binding peptide
  MOD_RES (14), (15): Xaa is C or S
YYVVPLPELQTPAXXP

SEQ ID NO: 8155 - protein, 25 aa, Artificial Sequence
  Cyclic GFR-binding peptide
  MOD_RES (19), (20): Xaa is C or S
PKRGVYYLITLPELAQPVXXPAASA

SEQ ID NO: 8156 - protein, 16 aa, Artificial Sequence
  Cyclic GFR-binding peptide
IVNSSDDIFLVSIPSL

SEQ ID NO: 8157 - protein, 21 aa, Artificial Sequence
  Cyclic GFR-binding peptide
  MOD_RES (15), (16): Xaa is C or S
DYYLVTLPELKTPAXXPKPVY

SEQ ID NO: 8158 - protein, 17 aa, Artificial Sequence
  Cyclic GFR-binding peptide
VKPKRGVYYLITLPELA

SEQ ID NO: 8159 - protein, 26 aa, Artificial Sequence
  Cyclic GFR-binding peptide
  MOD_RES (20), (21): Xaa is C or S
VNSSDDYYVVPLPELKTPAXXPKPVY

SEQ ID NO: 8160 - protein, 22 aa, Artificial Sequence
  Cyclic GFR-binding peptide
  MOD_RES (16), (17): Xaa is C or S
EDYYVMPLPELETPVXXAKPIS

SEQ ID NO: 8161 - protein, 24 aa, Artificial Sequence
  Cyclic GFR-binding peptide
  MOD_RES (18), (19): Xaa is C or S
SSDDYYVVPLPELQTPAXXPKPVT

SEQ ID NO: 8162 - protein, 19 aa, Artificial Sequence
  Cyclic GFR-binding peptide
  MOD_RES (14), (15): Xaa is C or S
YYVVPLPELQTPAXXPKPV

SEQ ID NO: 8163 - protein, 27 aa, Artificial Sequence
  Cyclic GFR-binding peptide
  MOD_RES (21), (22): Xaa is C or S
VKPTRGVIFLISIPSLDQPVXXPSASA

SEQ ID NO: 8164 - protein, 15 aa, Artificial Sequence
  Cyclic GFR-binding peptide
  MOD_RES (14), (15): Xaa is C or S
YYLVTLPELQTPAXX

SEQ ID NO: 8165 - protein, 26 aa, Artificial Sequence
  Cyclic GFR-binding peptide
  MOD_RES (20), (20): Xaa is C or S
VNSSDDYYLVTLPELKTPAXTPKTVH

SEQ ID NO: 8166 - protein, 15 aa, Artificial Sequence
  Cyclic GFR-binding peptide
VKPKRGVYYLITLPE

SEQ ID NO: 8167 - protein, 18 aa, Artificial Sequence
  Cyclic GFR-binding peptide
  MOD_RES (14), (15): Xaa is C or S
YYVIPLPELDQPVXXPSA

SEQ ID NO: 8168 - protein, 21 aa, Artificial Sequence
  Cyclic GFR-binding peptide
  MOD_RES (15), (16): Xaa is C or S
DYYLITLPELRTPVXXTPPTS

SEQ ID NO: 8169 - protein, 24 aa, Artificial Sequence
  Cyclic GFR-binding peptide
  MOD_RES (18), (19): Xaa is C or S
DYEDIFLMSIPSLETPVXXAKPIS

SEQ ID NO: 8170 - protein, 15 aa, Artificial Sequence
  Cyclic GFR-binding peptide
  MOD_RES (14), (15): Xaa is C or S
LYLISIASLRTPVXX

SEQ ID NO: 8171 - protein, 21 aa, Artificial Sequence
  Cyclic GFR-binding peptide
  MOD_RES (15), (15): Xaa is C or S
DIFLVSIPSLKTPAXTPKTVH

SEQ ID NO: 8172 - protein, 17 aa, Artificial Sequence
  Cyclic GFR-binding peptide
VVNNASDYYLITLPELR

SEQ ID NO: 8173 - protein, 24 aa, Artificial Sequence
  Cyclic GFR-binding peptide
  MOD_RES (18), (19): Xaa is C or S
SSDDYYLVTLPELKTPAXXPKPVY

SEQ ID NO: 8174 - protein, 15 aa, Artificial Sequence
  Cyclic GFR-binding peptide
  MOD_RES (14), (15): Xaa is C or S
FYLISIANLRTPVXX

SEQ ID NO: 8175 - protein, 22 aa, Artificial Sequence
  Cyclic GFR-binding peptide
  MOD_RES (16), (17): Xaa is C or S
SDYYLITLPELRTPVXXTPPTS

SEQ ID NO: 8176 - protein, 25 aa, Artificial Sequence
  Cyclic GFR-binding peptide
  MOD_RES (19), (19): Xaa is C or S
NSSDDYYVVPLPELKTPAXTPKTVH

SEQ ID NO: 8177 - protein, 15 aa, Artificial Sequence
  Cyclic GFR-binding peptide
IVNSSDDYYVVPLPE

SEQ ID NO: 8178 - protein, 20 aa, Artificial Sequence
  Cyclic GFR-binding peptide
  MOD_RES (14), (15): Xaa is C or S
YYVMPLPELETPVXXAKPIK

SEQ ID NO: 8179 - protein, 27 aa, Artificial Sequence
  Cyclic GFR-binding peptide
  MOD_RES (21), (21): Xaa is C or S
IVNSSDDYYLVTLPELKTPAXTPKTVH

SEQ ID NO: 8180 - protein, 21 aa, Artificial Sequence
  Cyclic GFR-binding peptide
  MOD_RES (15), (15): Xaa is C or S
DYYVVPLPELKTPAXTPKTVH

SEQ ID NO: 8181 - protein, 23 aa, Artificial Sequence
  Cyclic GFR-binding peptide
  MOD_RES (17), (18): Xaa is C or S
SDDIFLVSIPSLKTPAXXPKPVY

SEQ ID NO: 8182 - protein, 16 aa, Artificial Sequence
  Cyclic GFR-binding peptide
VVNNASDFYLISIANL

SEQ ID NO: 8183 - protein, 16 aa, Artificial Sequence
  Cyclic GFR-binding peptide
IKPTKGIYYVIPLPEL

SEQ ID NO: 8184 - protein, 15 aa, Artificial Sequence
  Cyclic GFR-binding peptide
  MOD_RES (14), (15): Xaa is C or S
YYLVTLPELKTPAXX

SEQ ID NO: 8185 - protein, 25 aa, Artificial Sequence
  Cyclic GFR-binding peptide
  MOD_RES (19), (19): Xaa is C or S
NSSDDIFLVSIPSLKTPAXTPKTVH

SEQ ID NO: 8186 - protein, 20 aa, Artificial Sequence
  Cyclic GFR-binding peptide
  MOD_RES (14), (14): Xaa is C or S
YYLVTLPELKTPAXTPKTVH

SEQ ID NO: 8187 - protein, 26 aa, Artificial Sequence
  Cyclic GFR-binding peptide
  MOD_RES (20), (21): Xaa is C or S
KPKRGVIFLISIPSLAQPVXXPAASA

SEQ ID NO: 8188 - protein, 14 aa, Artificial Sequence
  Cyclic GFR-binding peptide
  MOD_RES (14), (14): Xaa is C or S
YYVVPLPELKTPAX

SEQ ID NO: 8189 - protein, 18 aa, Artificial Sequence
  Cyclic GFR-binding peptide
VVKDYEDYYLMTLPELET

SEQ ID NO: 8190 - protein, 16 aa, Artificial Sequence
  Cyclic GFR-binding peptide
  MOD_RES (14), (15): Xaa is C or S
YYVIPLPELRTPVXXT

SEQ ID NO: 8191 - protein, 15 aa, Artificial Sequence
  Cyclic GFR-binding peptide
VVNNASDYYLITLPE

SEQ ID NO: 8192 - protein, 16 aa, Artificial Sequence
  Cyclic GFR-binding peptide
  MOD_RES (14), (15): Xaa is C or S
YYLVTLPELQTPAXXP

SEQ ID NO: 8193 - protein, 17 aa, Artificial Sequence
  Cyclic GFR-binding peptide
IVNSSDDYYLVTLPELK

SEQ ID NO: 8194 - protein, 17 aa, Artificial Sequence
  Cyclic GFR-binding peptide
VVKDYEDYYVMPLPELE

SEQ ID NO: 8195 - protein, 19 aa, Artificial Sequence
  Cyclic GFR-binding peptide
  MOD_RES (14), (14): Xaa is C or S
YYVVPLPELKTPAXTPKTV

SEQ ID NO: 8196 - protein, 25 aa, Artificial Sequence
  Cyclic GFR-binding peptide
  MOD_RES (19), (20): Xaa is C or S
NNASDYYVIPLPELRTPVXXTPPTS

SEQ ID NO: 8197 - protein, 23 aa, Artificial Sequence
  Cyclic GFR-binding peptide
  MOD_RES (17), (18): Xaa is C or S
SDDIFLVSIPSLQTPAXXPKPVT

SEQ ID NO: 8198 - protein, 17 aa, Artificial Sequence
  Cyclic GFR-binding peptide
IVNSSDDYYLVTLPELQ

SEQ ID NO: 8199 - protein, 27 aa, Artificial Sequence
  Cyclic GFR-binding peptide
  MOD_RES (21), (22): Xaa is C or S
VVKDYEDYYLMTLPELETPVXXAKPIS

SEQ ID NO: 8200 - protein, 22 aa, Artificial Sequence
  Cyclic GFR-binding peptide
  MOD_RES (16), (17): Xaa is C or S
DDIFLVSIPSLQTPAXXPKPVT

SEQ ID NO: 8201 - protein, 22 aa, Artificial Sequence
  Cyclic GFR-binding peptide
  MOD_RES (16), (17): Xaa is C or S
GVIFLISIPSLDQPVXXPSASA

SEQ ID NO: 8202 - protein, 22 aa, Artificial Sequence
  Cyclic GFR-binding peptide
  MOD_RES (16), (17): Xaa is C or S
DDIFLVSIPSLKTPAXXPKPVY

SEQ ID NO: 8203 - protein, 13 aa, Artificial Sequence
  Cyclic GFR-binding peptide
APTKLSPISVLFI

SEQ ID NO: 8204 - protein, 20 aa, Artificial Sequence
  Cyclic GFR-binding peptide
  MOD_RES (7), (7): Xaa is C or S
HVTKPTXAPTKLSPISVLFI

SEQ ID NO: 8205 - protein, 27 aa, Artificial Sequence
  Cyclic GFR-binding peptide
  MOD_RES (6), (7): Xaa is C or S
SIPKAXXVPTELEPLPMVYYDEYDKVV

SEQ ID NO: 8206 - protein, 23 aa, Artificial Sequence
  Cyclic GFR-binding peptide
  MOD_RES (6), (7): Xaa is C or S
YVPKPXXAPTKLEPLPVVYYDDS

SEQ ID NO: 8207 - protein, 24 aa, Artificial Sequence
  Cyclic GFR-binding peptide
  MOD_RES (6), (7): Xaa is C or S
STPPTXXVPTRLSAISILYLDSAN

SEQ ID NO: 8208 - protein, 26 aa, Artificial Sequence
  Cyclic GFR-binding peptide
  MOD_RES (6), (7): Xaa is C or S
YVPKPXXAPTKLSPISVLFIDDSSNV

SEQ ID NO: 8209 - protein, 19 aa, Artificial Sequence
  Cyclic GFR-binding peptide
  MOD_RES (5), (6): Xaa is C or S
VPKPXXAPTKLEPLTVLYY

SEQ ID NO: 8210 - protein, 15 aa, Artificial Sequence
  Cyclic GFR-binding peptide
SPISILFIVGRTPKV

SEQ ID NO: 8211 - protein, 24 aa, Artificial Sequence
  Cyclic GFR-binding peptide
  MOD_RES (6), (7): Xaa is C or S
YVPKPXXAPTKLSPISVLFIDDSS

SEQ ID NO: 8212 - protein, 26 aa, Artificial Sequence
  Cyclic GFR-binding peptide
  MOD_RES (7), (7): Xaa is C or S
HVTKPTXAPTKLSPISVLFIDDSSNV

SEQ ID NO: 8213 - protein, 20 aa, Artificial Sequence
  Cyclic GFR-binding peptide
  MOD_RES (6), (7): Xaa is C or S
SIPKAXXVPTELSPISMLFI

SEQ ID NO: 8214 - protein, 19 aa, Artificial Sequence
  Cyclic GFR-binding peptide
  MOD_RES (5), (6): Xaa is C or S
VPKPXXAPTKLEPLPVVYY

SEQ ID NO: 8215 - protein, 26 aa, Artificial Sequence
  Cyclic GFR-binding peptide
  MOD_RES (6), (7): Xaa is C or S
TVPKPXXAPTQLEPLTVLYYDDSSNV

SEQ ID NO: 8216 - protein, 23 aa, Artificial Sequence
  Cyclic GFR-binding peptide
  MOD_RES (6), (7): Xaa is C or S
ASASPXXVSQDLSPISILFIIGK

SEQ ID NO: 8217 - protein, 16 aa, Artificial Sequence
  Cyclic GFR-binding peptide
  MOD_RES (2), (3): Xaa is C or S
PXXVPQDLEPLPIVYY

SEQ ID NO: 8218 - protein, 20 aa, Artificial Sequence
  Cyclic GFR-binding peptide
  MOD_RES (6), (7): Xaa is C or S
ASASPXXVSQDLEPLPIVYY

SEQ ID NO: 8219 - protein, 20 aa, Artificial Sequence
  Cyclic GFR-binding peptide
  MOD_RES (6), (7): Xaa is C or S
STPPTXXVPTRLSAISILYL

SEQ ID NO: 8220 - protein, 17 aa, Artificial Sequence
  Cyclic GFR-binding peptide
DLEPLPIVYYVGRTPKV

SEQ ID NO: 8221 - protein, 16 aa, Artificial Sequence
  Cyclic GFR-binding peptide
LSPISILFIIGKTPKI

SEQ ID NO: 8222 - protein, 18 aa, Artificial Sequence
  Cyclic GFR-binding peptide
TELSPISMLFIDENEKVV

SEQ ID NO: 8223 - protein, 15 aa, Artificial Sequence
  Cyclic GFR-binding peptide
NAISILYFDSANNVV

SEQ ID NO: 8224 - protein, 19 aa, Artificial Sequence
  Cyclic GFR-binding peptide
PTKLEPLPVVYYDDSSNVI

SEQ ID NO: 8225 - protein, 14 aa, Artificial Sequence
  Cyclic GFR-binding peptide
  MOD_RES (1), (1): Xaa is C or S
XVPTRLEPLPIVYY

SEQ ID NO: 8226 - protein, 19 aa, Artificial Sequence
  Cyclic GFR-binding peptide
PTQLEPLPVVYYDDSSNVI

SEQ ID NO: 8227 - protein, 15 aa, Artificial Sequence
  Cyclic GFR-binding peptide
SAISILYLDSANNVV

SEQ ID NO: 8228 - protein, 20 aa, Artificial Sequence
  Cyclic GFR-binding peptide
  MOD_RES (6), (7): Xaa is C or S
KIPKAXXVPTELEPLTMLYY

SEQ ID NO: 8229 - protein, 15 aa, Artificial Sequence
  Cyclic GFR-binding peptide
EPLTMLYYDEYDKVV

SEQ ID NO: 8230 - protein, 15 aa, Artificial Sequence
  Cyclic GFR-binding peptide
  MOD_RES (1), (2): Xaa is C or S
XXAPTKLEPLPVVYY

SEQ ID NO: 8231 - protein, 15 aa, Artificial Sequence
  Cyclic GFR-binding peptide
  MOD_RES (2), (2): Xaa is C or S
TXAPTKLSPISVLFI

SEQ ID NO: 8232 - protein, 24 aa, Artificial Sequence
  Cyclic GFR-binding peptide
  MOD_RES (6), (7): Xaa is C or S
ASAAPXXVPQALSPISILFIVGRK

SEQ ID NO: 8233 - protein, 13 aa, Artificial Sequence
  Cyclic GFR-binding peptide
APTKLEPLPVVYY

SEQ ID NO: 8234 - protein, 20 aa, Artificial Sequence
  Cyclic GFR-binding peptide
  MOD_RES (6), (7): Xaa is C or S
SIPKAXXVPTELEPLPMVYY

SEQ ID NO: 8235 - protein, 27 aa, Artificial Sequence
  Cyclic GFR-binding peptide
  MOD_RES (6), (7): Xaa is C or S
TVPKPXXAPTQLSPISVLFIDDSSNVI

SEQ ID NO: 8236 - protein, 14 aa, Artificial Sequence
  Cyclic GFR-binding peptide
  MOD_RES (1), (1): Xaa is C or S
XVPTRLEPLTILYY

SEQ ID NO: 8237 - protein, 18 aa, Artificial Sequence
  Cyclic GFR-binding peptide
TRLNAISILYFDSANNVV

SEQ ID NO: 8238 - protein, 14 aa, Artificial Sequence
  Cyclic GFR-binding peptide
  MOD_RES (1), (1): Xaa is C or S
XAPTKLEPLTVLYY

SEQ ID NO: 8239 - protein, 19 aa, Artificial Sequence
  Cyclic GFR-binding peptide
PQALEPLTILYYVGRKPKV

SEQ ID NO: 8240 - protein, 19 aa, Artificial Sequence
  Cyclic GFR-binding peptide
  MOD_RES (6), (6): Xaa is C or S
VTKPTXAPTKLEPLTVLYY

SEQ ID NO: 8241 - protein, 15 aa, Artificial Sequence
  Cyclic GFR-binding peptide
  MOD_RES (2), (2): Xaa is C or S
TXAPTKLEPLPVVYY

SEQ ID NO: 8242 - protein, 24 aa, Artificial Sequence
  Cyclic GFR-binding peptide
  MOD_RES (7), (7): Xaa is C or S
HVTKPTXAPTKLEPLTVLYYDDSS

SEQ ID NO: 8243 - protein, 22 aa, Artificial Sequence
  Cyclic GFR-binding peptide
  MOD_RES (6), (7): Xaa is C or S
ASAAPXXVPQALEPLTILYYVG

SEQ ID NO: 8244 - protein, 20 aa, Artificial Sequence
  Cyclic GFR-binding peptide
  MOD_RES (6), (7): Xaa is C or S
ASASPXXVSQDLSPISILFI

SEQ ID NO: 8245 - protein, 18 aa, Artificial Sequence
  Cyclic GFR-binding peptide
QALEPLTILYYVGRKPKV

SEQ ID NO: 8246 - protein, 22 aa, Artificial Sequence
  Cyclic GFR-binding peptide
  MOD_RES (6), (7): Xaa is C or S
KIPKAXXVPTELEPLPMVYYDE

SEQ ID NO: 8247 - protein, 18 aa, Artificial Sequence
  Cyclic GFR-binding peptide
  MOD_RES (4), (5): Xaa is C or S
ASPXXVPQDLSPISILFI

SEQ ID NO: 8248 - protein, 20 aa, Artificial Sequence
  Cyclic GFR-binding peptide
  MOD_RES (7), (7): Xaa is C or S
HVTKPTXAPTKLEPLPVVYY

SEQ ID NO: 8249 - protein, 16 aa, Artificial Sequence
  Cyclic GFR-binding peptide
LSPISILFIVGRKPKV

SEQ ID NO: 8250 - protein, 26 aa, Artificial Sequence
  Cyclic GFR-binding peptide
  MOD_RES (6), (7): Xaa is C or S
KIPKAXXVPTELEPLPMVYYDENEKV

SEQ ID NO: 8251 - protein, 23 aa, Artificial Sequence
  Cyclic GFR-binding peptide
  MOD_RES (6), (7): Xaa is C or S
ASASPXXVPQDLSPISILFIVGR

SEQ ID NO: 8252 - protein, 16 aa, Artificial Sequence
  Cyclic GFR-binding peptide
  MOD_RES (2), (3): Xaa is C or S
PXXVPQDLSPISILFI

SEQ ID NO: 8253 - protein, 22 aa, Artificial Sequence
  Cyclic GFR-binding peptide
  MOD_RES (6), (7): Xaa is C or S
STPPTXXVPTRLEPLPIVYYDS

SEQ ID NO: 8254 - protein, 17 aa, Artificial Sequence
  Cyclic GFR-binding peptide
  MOD_RES (3), (4): Xaa is C or S
KAXXVPTELEPLTMLYY

SEQ ID NO: 8255 - protein, 19 aa, Artificial Sequence
  Cyclic GFR-binding peptide
SQDLSPISILFIIGKTPKI

SEQ ID NO: 8256 - protein, 22 aa, Artificial Sequence
  Cyclic GFR-binding peptide
  MOD_RES (7), (7): Xaa is C or S
HVTKPTXAPTKLEPLPVVYYDD

SEQ ID NO: 8257 - protein, 25 aa, Artificial Sequence
  Cyclic GFR-binding peptide
  MOD_RES (6), (7): Xaa is C or S
KIPKAXXVPTELEPLTMLYYDENEK

SEQ ID NO: 8258 - protein, 18 aa, Artificial Sequence
  Cyclic GFR-binding peptide
  MOD_RES (4), (5): Xaa is C or S
AAPXXVPQALSPISILFI

SEQ ID NO: 8259 - protein, 16 aa, Artificial Sequence
  Cyclic GFR-binding peptide
LSAISILYLDSANNVV

SEQ ID NO: 8260 - protein, 21 aa, Artificial Sequence
  Cyclic GFR-binding peptide
  MOD_RES (6), (7): Xaa is C or S
YVPKPXXAPTKLEPLPVVYYD

SEQ ID NO: 8261 - protein, 16 aa, Artificial Sequence
  Cyclic GFR-binding peptide
LEPLTMLYYDEYDKVV

SEQ ID NO: 8262 - protein, 25 aa, Artificial Sequence
  Cyclic GFR-binding peptide
  MOD_RES (6), (7): Xaa is C or S
STPPTXXVPTRLNAISILYFDSANN

SEQ ID NO: 8263 - protein, 25 aa, Artificial Sequence
  Cyclic GFR-binding peptide
  MOD_RES (6), (7): Xaa is C or S
KIPKAXXVPTELEPLPMVYYDENEK

SEQ ID NO: 8264 - protein, 17 aa, Artificial Sequence
  Cyclic GFR-binding peptide
QLEPLPVVYYDDSSNVI

SEQ ID NO: 8265 - protein, 17 aa, Artificial Sequence
  Cyclic GFR-binding peptide
DLEPLPIVYYIGKTPKI

SEQ ID NO: 8266 - protein, 27 aa, Artificial Sequence
  Cyclic GFR-binding peptide
  MOD_RES (6), (7): Xaa is C or S
ASAAPXXVPQALSPISILFIVGRKPKV

SEQ ID NO: 8267 - protein, 17 aa, Artificial Sequence
  Cyclic GFR-binding peptide
KLEPLPVVYYDDSSNVI

SEQ ID NO: 8268 - protein, 23 aa, Artificial Sequence
  Cyclic GFR-binding peptide
  MOD_RES (6), (7): Xaa is C or S
STPPTXXVPTRLEPLPIVYYDSA

SEQ ID NO: 8269 - protein, 15 aa, Artificial Sequence
  Cyclic GFR-binding peptide
EPLPIVYYIGKTPKI

SEQ ID NO: 8270 - protein, 27 aa, Artificial Sequence
  Cyclic GFR-binding peptide
  MOD_RES (6), (7): Xaa is C or S
STPPTXXVPTRLEPLPIVYYDSANNVV

SEQ ID NO: 8271 - protein, 21 aa, Artificial Sequence
  Cyclic GFR-binding peptide
  MOD_RES (6), (7): Xaa is C or S
TVPKPXXAPTQLEPLPVVYYD

SEQ ID NO: 8272 - protein, 15 aa, Artificial Sequence
  Cyclic GFR-binding peptide
  MOD_RES (1), (2): Xaa is C or S
XXVPTRLEPLPIVYY

SEQ ID NO: 8273 - protein, 24 aa, Artificial Sequence
  Cyclic GFR-binding peptide
  MOD_RES (6), (7): Xaa is C or S
STPPTXXVPTRLEPLPIVYYDSAN

SEQ ID NO: 8274 - protein, 19 aa, Artificial Sequence
  Cyclic GFR-binding peptide
PTELEPLTMLYYDEYDKVV

SEQ ID NO: 8275 - protein, 24 aa, Artificial Sequence
  Cyclic GFR-binding peptide
  MOD_RES (6), (7): Xaa is C or S
ASASPXXVPQDLEPLPIVYYVGRT

SEQ ID NO: 8276 - protein, 25 aa, Artificial Sequence
  Cyclic GFR-binding peptide
  MOD_RES (6), (7): Xaa is C or S
ASASPXXVPQDLSPISILFIVGRTP

SEQ ID NO: 8277 - protein, 27 aa, Artificial Sequence
  Cyclic GFR-binding peptide
  MOD_RES (6), (7): Xaa is C or S
KIPKAXXVPTELEPLTMLYYDENEKVV

SEQ ID NO: 8278 - protein, 16 aa, Artificial Sequence
  Cyclic GFR-binding peptide
  MOD_RES (2), (3): Xaa is C or S
PXXVSQDLEPLPIVYY

SEQ ID NO: 8279 - protein, 20 aa, Artificial Sequence
  Cyclic GFR-binding peptide
  MOD_RES (6), (7): Xaa is C or S
SIPKAXXVPTELEPLTMLYY

SEQ ID NO: 8280 - protein, 22 aa, Artificial Sequence
  Cyclic GFR-binding peptide
  MOD_RES (6), (7): Xaa is C or S
KIPKAXXVPTELEPLTMLYYDE

SEQ ID NO: 8281 - protein, 25 aa, Artificial Sequence
  Cyclic GFR-binding peptide
  MOD_RES (6), (7): Xaa is C or S
TVPKPXXAPTQLEPLTVLYYDDSSN

SEQ ID NO: 8282 - protein, 18 aa, Artificial Sequence
  Cyclic GFR-binding peptide
QDLEPLPIVYYVGRTPKV

SEQ ID NO: 8283 - protein, 27 aa, Artificial Sequence
  Cyclic GFR-binding peptide
  MOD_RES (6), (7): Xaa is C or S
YVPKPXXAPTKLSPISVLFIDDSSNVI

SEQ ID NO: 8284 - protein, 14 aa, Artificial Sequence
  Cyclic GFR-binding peptide
  MOD_RES (1), (1): Xaa is C or S
XAPTKLSPISVLFI

SEQ ID NO: 8285 - protein, 27 aa, Artificial Sequence
  Cyclic GFR-binding peptide
  MOD_RES (7), (7): Xaa is C or S
HVTKPTXAPTKLEPLPVVYYDDSSNVI

SEQ ID NO: 8286 - protein, 26 aa, Artificial Sequence
  Cyclic GFR-binding peptide
  MOD_RES (6), (7): Xaa is C or S
YVPKPXXAPTKLEPLTVLYYDDSSNV

SEQ ID NO: 8287 - protein, 15 aa, Artificial Sequence
  Cyclic GFR-binding peptide
  MOD_RES (1), (2): Xaa is C or S
XXVPTRLEPLTILYY

SEQ ID NO: 8288 - protein, 16 aa, Artificial Sequence
  Cyclic GFR-binding peptide
  MOD_RES (2), (3): Xaa is C or S
PXXAPTQLSPISVLFI

SEQ ID NO: 8289 - protein, 19 aa, Artificial Sequence
  Cyclic GFR-binding peptide
  MOD_RES (5), (6): Xaa is C or S
VPKPXXAPTKLSPISVLFI

SEQ ID NO: 8290 - protein, 24 aa, Artificial Sequence
  Cyclic GFR-binding peptide
  MOD_RES (6), (7): Xaa is C or S
KIPKAXXVPTELEPLPMVYYDENE

SEQ ID NO: 8291 - protein, 16 aa, Artificial Sequence
  Cyclic GFR-binding peptide
LEPLPVVYYDDSSNVI

SEQ ID NO: 8292 - protein, 26 aa, Artificial Sequence
  Cyclic GFR-binding peptide
  MOD_RES (6), (7): Xaa is C or S
STPPTXXVPTRLEPLPIVYYDSANNV

SEQ ID NO: 8293 - protein, 25 aa, Artificial Sequence
  Cyclic GFR-binding peptide
  MOD_RES (6), (7): Xaa is C or S
STPPTXXVPTRLSAISILYLDSANN

SEQ ID NO: 8294 - protein, 19 aa, Artificial Sequence
  Cyclic GFR-binding peptide
  MOD_RES (5), (6): Xaa is C or S
TPPTXXVPTRLEPLPIVYY

SEQ ID NO: 8295 - protein, 23 aa, Artificial Sequence
  Cyclic GFR-binding peptide
  MOD_RES (6), (7): Xaa is C or S
SIPKAXXVPTELEPLTMLYYDEY

SEQ ID NO: 8296 - protein, 23 aa, Artificial Sequence
  Cyclic GFR-binding peptide
  MOD_RES (6), (7): Xaa is C or S
ASASPXXVSQDLEPLPIVYYIGK

SEQ ID NO: 8297 - protein, 17 aa, Artificial Sequence
  Cyclic GFR-binding peptide
ELEPLTMLYYDEYDKVV

SEQ ID NO: 8298 - protein, 15 aa, Artificial Sequence
  Cyclic GFR-binding peptide
  MOD_RES (1), (2): Xaa is C or S
XXAPTKLSPISVLFI

SEQ ID NO: 8299 - protein, 23 aa, Artificial Sequence
  Cyclic GFR-binding peptide
  MOD_RES (6), (7): Xaa is C or S
SIPKAXXVPTELEPLPMVYYDEY

SEQ ID NO: 8300 - protein, 21 aa, Artificial Sequence
  Cyclic GFR-binding peptide
  MOD_RES (6), (7): Xaa is C or S
ASASPXXVPQDLEPLPIVYYV

SEQ ID NO: 8301 - protein, 19 aa, Artificial Sequence
  Cyclic GFR-binding peptide
PTRLNAISILYFDSANNVV

SEQ ID NO: 8302 - protein, 18 aa, Artificial Sequence
  Cyclic GFR-binding peptide
  MOD_RES (4), (5): Xaa is C or S
PKPXXAPTKLSPISVLFI

SEQ ID NO: 8303 - protein, 22 aa, Artificial Sequence
  Cyclic GFR-binding peptide
  MOD_RES (6), (7): Xaa is C or S
ASASPXXVSQDLEPLPIVYYIG

SEQ ID NO: 8304 - protein, 22 aa, Artificial Sequence
  Cyclic GFR-binding peptide
  MOD_RES (7), (7): Xaa is C or S
HVTKPTXAPTKLSPISVLFIDD

SEQ ID NO: 8305 - protein, 18 aa, Artificial Sequence
  Cyclic GFR-binding peptide
  MOD_RES (4), (5): Xaa is C or S
PKPXXAPTQLSPISVLFI

SEQ ID NO: 8306 - protein, 18 aa, Artificial Sequence
  Cyclic GFR-binding peptide
TRLSAISILYLDSANNVV

SEQ ID NO: 8307 - protein, 19 aa, Artificial Sequence
  Cyclic GFR-binding peptide
  MOD_RES (6), (6): Xaa is C or S
VTKPTXAPTKLSPISVLFI

SEQ ID NO: 8308 - protein, 15 aa, Artificial Sequence
  Cyclic GFR-binding peptide
EPLPIVYYDSANNVV

SEQ ID NO: 8309 - protein, 21 aa, Artificial Sequence
  Cyclic GFR-binding peptide
  MOD_RES (6), (7): Xaa is C or S
KIPKAXXVPTELSPISMLFID

SEQ ID NO: 8310 - protein, 18 aa, Artificial Sequence
  Cyclic GFR-binding peptide
TQLEPLTVLYYDDSSNVI

SEQ ID NO: 8311 - protein, 22 aa, Artificial Sequence
  Cyclic GFR-binding peptide
  MOD_RES (6), (7): Xaa is C or S
YVPKPXXAPTKLEPLTVLYYDD

SEQ ID NO: 8312 - protein, 19 aa, Artificial Sequence
  Cyclic GFR-binding peptide
PTELSPISMLFIDENEKVV

SEQ ID NO: 8313 - protein, 24 aa, Artificial Sequence
  Cyclic GFR-binding peptide
  MOD_RES (6), (7): Xaa is C or S
TVPKPXXAPTQLSPISVLFIDDSS

SEQ ID NO: 8314 - protein, 23 aa, Artificial Sequence
  Cyclic GFR-binding peptide
  MOD_RES (6), (7): Xaa is C or S
ASASPXXVPQDLEPLPIVYYVGR

SEQ ID NO: 8315 - protein, 18 aa, Artificial Sequence
  Cyclic GFR-binding peptide
TKLEPLTVLYYDDSSNVI

SEQ ID NO: 8316 - protein, 21 aa, Artificial Sequence
  Cyclic GFR-binding peptide
  MOD_RES (6), (7): Xaa is C or S
SIPKAXXVPTELEPLPMVYYD

SEQ ID NO: 8317 - protein, 13 aa, Artificial Sequence
  Cyclic GFR-binding peptide
VPTRLEPLPIVYY

SEQ ID NO: 8318 - protein, 20 aa, Artificial Sequence
  Cyclic GFR-binding peptide
  MOD_RES (6), (7): Xaa is C or S
KIPKAXXVPTELSPISMLFI

SEQ ID NO: 8319 - protein, 15 aa, Artificial Sequence
  Cyclic GFR-binding peptide
  MOD_RES (2), (2): Xaa is C or S
TXAPTKLEPLTVLYY

SEQ ID NO: 8320 - protein, 25 aa, Artificial Sequence
  Cyclic GFR-binding peptide
  MOD_RES (6), (7): Xaa is C or S
YVPKPXXAPTKLEPLPVVYYDDSSN

SEQ ID NO: 8321 - protein, 24 aa, Artificial Sequence
  Cyclic GFR-binding peptide
  MOD_RES (6), (7): Xaa is C or S
STPPTXXVPTRLNAISILYFDSAN

SEQ ID NO: 8322 - protein, 18 aa, Artificial Sequence
  Cyclic GFR-binding peptide
  MOD_RES (4), (5): Xaa is C or S
ASPXXVSQDLSPISILFI

SEQ ID NO: 8323 - protein, 22 aa, Artificial Sequence
  Cyclic GFR-binding peptide
  MOD_RES (6), (7): Xaa is C or S
ASASPXXVPQDLEPLPIVYYVG

SEQ ID NO: 8324 - protein, 17 aa, Artificial Sequence
  Cyclic GFR-binding peptide
ELSPISMLFIDENEKVV

SEQ ID NO: 8325 - protein, 19 aa, Artificial Sequence
  Cyclic GFR-binding peptide
SQDLEPLPIVYYIGKTPKI

SEQ ID NO: 8326 - protein, 18 aa, Artificial Sequence
  Cyclic GFR-binding peptide
  MOD_RES (4), (5): Xaa is C or S
PKPXXAPTKLEPLTVLYY

SEQ ID NO: 8327 - protein, 18 aa, Artificial Sequence
  Cyclic GFR-binding peptide
TELEPLPMVYYDENEKVV

SEQ ID NO: 8328 - protein, 21 aa, Artificial Sequence
  Cyclic GFR-binding peptide
  MOD_RES (6), (7): Xaa is C or S
TVPKPXXAPTQLSPISVLFID

SEQ ID NO: 8329 - protein, 20 aa, Artificial Sequence
  Cyclic GFR-binding peptide
  MOD_RES (6), (7): Xaa is C or S
ASAAPXXVPQALSPISILFI

SEQ ID NO: 8330 - protein, 25 aa, Artificial Sequence
  Cyclic GFR-binding peptide
  MOD_RES (6), (7): Xaa is C or S
ASASPXXVSQDLEPLPIVYYIGKTP

SEQ ID NO: 8331 - protein, 21 aa, Artificial Sequence
  Cyclic GFR-binding peptide
  MOD_RES (6), (7): Xaa is C or S
ASAAPXXVPQALSPISILFIV

SEQ ID NO: 8332 - protein, 23 aa, Artificial Sequence
  Cyclic GFR-binding peptide
  MOD_RES (6), (7): Xaa is C or S
STPPTXXVPTRLNAISILYFDSA

SEQ ID NO: 8333 - protein, 22 aa, Artificial Sequence
  Cyclic GFR-binding peptide
  MOD_RES (6), (7): Xaa is C or S
SIPKAXXVPTELEPLTMLYYDE

SEQ ID NO: 8334 - protein, 13 aa, Artificial Sequence
  Cyclic GFR-binding peptide
APTQLEPLTVLYY

SEQ ID NO: 8335 - protein, 18 aa, Artificial Sequence
  Cyclic GFR-binding peptide
TELSPISMLFIDEYDKVV

SEQ ID NO: 8336 - protein, 21 aa, Artificial Sequence
  Cyclic GFR-binding peptide
  MOD_RES (6), (7): Xaa is C or S
KIPKAXXVPTELEPLPMVYYD

SEQ ID NO: 8337 - protein, 18 aa, Artificial Sequence
  Cyclic GFR-binding peptide
  MOD_RES (4), (5): Xaa is C or S
PPTXXVPTRLEPLTILYY

SEQ ID NO: 8338 - protein, 18 aa, Artificial Sequence
  Cyclic GFR-binding peptide
  MOD_RES (4), (5): Xaa is C or S
PKPXXAPTKLEPLPVVYY

SEQ ID NO: 8339 - protein, 13 aa, Artificial Sequence
  Cyclic GFR-binding peptide
VPTRLEPLTILYY

SEQ ID NO: 8340 - protein, 20 aa, Artificial Sequence
  Cyclic GFR-binding peptide
  MOD_RES (6), (7): Xaa is C or S
ASASPXXVPQDLSPISILFI

SEQ ID NO: 8341 - protein, 17 aa, Artificial Sequence
  Cyclic GFR-binding peptide
  MOD_RES (3), (4): Xaa is C or S
KPXXAPTKLSPISVLFI

SEQ ID NO: 8342 - protein, 21 aa, Artificial Sequence
  Cyclic GFR-binding peptide
  MOD_RES (6), (7): Xaa is C or S
SIPKAXXVPTELSPISMLFID

SEQ ID NO: 8343 - protein, 19 aa, Artificial Sequence
  Cyclic GFR-binding peptide
PTELEPLPMVYYDEYDKVV

SEQ ID NO: 8344 - protein, 26 aa, Artificial Sequence
  Cyclic GFR-binding peptide
  MOD_RES (6), (7): Xaa is C or S
ASASPXXVPQDLEPLPIVYYVGRTPK

SEQ ID NO: 8345 - protein, 27 aa, Artificial Sequence
  Cyclic GFR-binding peptide
  MOD_RES (6), (7): Xaa is C or S
ASASPXXVSQDLEPLPIVYYIGKTPKI

SEQ ID NO: 8346 - protein, 25 aa, Artificial Sequence
  Cyclic GFR-binding peptide
  MOD_RES (6), (7): Xaa is C or S
KIPKAXXVPTELSPISMLFIDENEK

SEQ ID NO: 8347 - protein, 16 aa, Artificial Sequence
  Cyclic GFR-binding peptide
  MOD_RES (2), (3): Xaa is C or S
PXXVPQALEPLTILYY

SEQ ID NO: 8348 - protein, 21 aa, Artificial Sequence
  Cyclic GFR-binding peptide
  MOD_RES (6), (7): Xaa is C or S
STPPTXXVPTRLEPLPIVYYD

SEQ ID NO: 8349 - protein, 21 aa, Artificial Sequence
  Cyclic GFR-binding peptide
  MOD_RES (6), (7): Xaa is C or S
ASASPXXVSQDLEPLPIVYYI

SEQ ID NO: 8350 - protein, 17 aa, Artificial Sequence
  Cyclic GFR-binding peptide
QLSPISVLFIDDSSNVI

SEQ ID NO: 8351 - protein, 17 aa, Artificial Sequence
  Cyclic GFR-binding peptide
KLSPISVLFIDDSSNVI

SEQ ID NO: 8352 - protein, 22 aa, Artificial Sequence
  Cyclic GFR-binding peptide
  MOD_RES (6), (7): Xaa is C or S
SIPKAXXVPTELSPISMLFIDE

SEQ ID NO: 8353 - protein, 27 aa, Artificial Sequence
  Cyclic GFR-binding peptide
  MOD_RES (6), (7): Xaa is C or S
SIPKAXXVPTELSPISMLFIDEYDKVV

SEQ ID NO: 8354 - protein, 21 aa, Artificial Sequence
  Cyclic GFR-binding peptide
  MOD_RES (6), (7): Xaa is C or S
STPPTXXVPTRLSAISILYLD

SEQ ID NO: 8355 - protein, 17 aa, Artificial Sequence
  Cyclic GFR-binding peptide
  MOD_RES (3), (4): Xaa is C or S
KAXXVPTELSPISMLFI

SEQ ID NO: 8356 - protein, 16 aa, Artificial Sequence
  Cyclic GFR-binding peptide
LEPLTMLYYDENEKVV

SEQ ID NO: 8357 - protein, 17 aa, Artificial Sequence
  Cyclic GFR-binding peptide
  MOD_RES (3), (4): Xaa is C or S
KPXXAPTKLEPLPVVYY

SEQ ID NO: 8358 - protein, 24 aa, Artificial Sequence
  Cyclic GFR-binding peptide
  MOD_RES (7), (7): Xaa is C or S
HVTKPTXAPTKLEPLPVVYYDDSS

SEQ ID NO: 8359 - protein, 22 aa, Artificial Sequence
  Cyclic GFR-binding peptide
  MOD_RES (6), (7): Xaa is C or S
YVPKPXXAPTKLEPLPVVYYDD

SEQ ID NO: 8360 - protein, 19 aa, Artificial Sequence
  Cyclic GFR-binding peptide
  MOD_RES (5), (6): Xaa is C or S
TPPTXXVPTRLEPLTILYY

SEQ ID NO: 8361 - protein, 23 aa, Artificial Sequence
  Cyclic GFR-binding peptide
  MOD_RES (6), (7): Xaa is C or S
ASAAPXXVPQALSPISILFIVGR

SEQ ID NO: 8362 - protein, 25 aa, Artificial Sequence
  Cyclic GFR-binding peptide
  MOD_RES (6), (7): Xaa is C or S
ASASPXXVPQDLEPLPIVYYVGRTP

SEQ ID NO: 8363 - protein, 18 aa, Artificial Sequence
  Cyclic GFR-binding peptide
  MOD_RES (4), (5): Xaa is C or S
PKAXXVPTELSPISMLFI

SEQ ID NO: 8364 - protein, 22 aa, Artificial Sequence
  Cyclic GFR-binding peptide
  MOD_RES (6), (7): Xaa is C or S
ASAAPXXVPQALSPISILFIVG

SEQ ID NO: 8365 - protein, 18 aa, Artificial Sequence
  Cyclic GFR-binding peptide
  MOD_RES (4), (5): Xaa is C or S
PPTXXVPTRLNAISILYF

SEQ ID NO: 8366 - protein, 27 aa, Artificial Sequence
  Cyclic GFR-binding peptide
  MOD_RES (6), (7): Xaa is C or S
YVPKPXXAPTKLEPLPVVYYDDSSNVI

SEQ ID NO: 8367 - protein, 22 aa, Artificial Sequence
  Cyclic GFR-binding peptide
  MOD_RES (7), (7): Xaa is C or S
HVTKPTXAPTKLEPLTVLYYDD

SEQ ID NO: 8368 - protein, 17 aa, Artificial Sequence
  Cyclic GFR-binding peptide
  MOD_RES (3), (4): Xaa is C or S
KPXXAPTKLEPLTVLYY

SEQ ID NO: 8369 - protein, 23 aa, Artificial Sequence
  Cyclic GFR-binding peptide
  MOD_RES (6), (7): Xaa is C or S
KIPKAXXVPTELEPLPMVYYDEN

SEQ ID NO: 8370 - protein, 24 aa, Artificial Sequence
  Cyclic GFR-binding peptide
  MOD_RES (6), (7): Xaa is C or S
YVPKPXXAPTKLEPLPVVYYDDSS

SEQ ID NO: 8371 - protein, 22 aa, Artificial Sequence
  Cyclic GFR-binding peptide
  MOD_RES (6), (7): Xaa is C or S
TVPKPXXAPTQLEPLPVVYYDD

SEQ ID NO: 8372 - protein, 20 aa, Artificial Sequence
  Cyclic GFR-binding peptide
  MOD_RES (6), (7): Xaa is C or S
ASAAPXXVPQALEPLTILYY

SEQ ID NO: 8373 - protein, 14 aa, Artificial Sequence
  Cyclic GFR-binding peptide
  MOD_RES (1), (1): Xaa is C or S
XVPQDLEPLPIVYY

SEQ ID NO: 8374 - protein, 17 aa, Artificial Sequence
  Cyclic GFR-binding peptide
RLSAISILYLDSANNVV

SEQ ID NO: 8375 - protein, 18 aa, Artificial Sequence
  Cyclic GFR-binding peptide
  MOD_RES (4), (5): Xaa is C or S
PKPXXAPTQLEPLTVLYY

SEQ ID NO: 8376 - protein, 15 aa, Artificial Sequence
  Cyclic GFR-binding peptide
  MOD_RES (1), (2): Xaa is C or S
XXVPTELSPISMLFI

SEQ ID NO: 8377 - protein, 22 aa, Artificial Sequence
  Cyclic GFR-binding peptide
  MOD_RES (6), (7): Xaa is C or S
STPPTXXVPTRLSAISILYLDS

SEQ ID NO: 8378 - protein, 19 aa, Artificial Sequence
  Cyclic GFR-binding peptide
PTELEPLPMVYYDENEKVV

SEQ ID NO: 8379 - protein, 15 aa, Artificial Sequence
  Cyclic GFR-binding peptide
SPISILFIVGRKPKV

SEQ ID NO: 8380 - protein, 17 aa, Artificial Sequence
  Cyclic GFR-binding peptide
  MOD_RES (3), (4): Xaa is C or S
PTXXVPTRLSAISILYL

SEQ ID NO: 8381 - protein, 19 aa, Artificial Sequence
  Cyclic GFR-binding peptide
  MOD_RES (5), (6): Xaa is C or S
TPPTXXVPTRLNAISILYF

SEQ ID NO: 8382 - protein, 19 aa, Artificial Sequence
  Cyclic GFR-binding peptide
PTKLEPLTVLYYDDSSNVI

SEQ ID NO: 8383 - protein, 18 aa, Artificial Sequence
  Cyclic GFR-binding peptide
  MOD_RES (4), (5): Xaa is C or S
AAPXXVPQALEPLTILYY

SEQ ID NO: 8384 - protein, 19 aa, Artificial Sequence
  Cyclic GFR-binding peptide
PTQLEPLTVLYYDDSSNVI

SEQ ID NO: 8385 - protein, 20 aa, Artificial Sequence
  Cyclic GFR-binding peptide
  MOD_RES (6), (7): Xaa is C or S
STPPTXXVPTRLNAISILYF

SEQ ID NO: 8386 - protein, 13 aa, Artificial Sequence
  Cyclic GFR-binding peptide
VPTRLNAISILYF

SEQ ID NO: 8387 - protein, 27 aa, Artificial Sequence
  Cyclic GFR-binding peptide
  MOD_RES (6), (7): Xaa is C or S
KIPKAXXVPTELEPLPMVYYDENEKVV

SEQ ID NO: 8388 - protein, 17 aa, Artificial Sequence
  Cyclic GFR-binding peptide
  MOD_RES (3), (4): Xaa is C or S
SPXXVPQDLSPISILFI

SEQ ID NO: 8389 - protein, 18 aa, Artificial Sequence
  Cyclic GFR-binding peptide
QDLEPLPIVYYIGKTPKI

SEQ ID NO: 8390 - protein, 16 aa, Artificial Sequence
  Cyclic GFR-binding peptide
  MOD_RES (2), (3): Xaa is C or S
PXXVPQALSPISILFI

SEQ ID NO: 8391 - protein, 25 aa, Artificial Sequence
  Cyclic GFR-binding peptide
  MOD_RES (6), (7): Xaa is C or S
SIPKAXXVPTELSPISMLFIDEYDK

SEQ ID NO: 8392 - protein, 25 aa, Artificial Sequence
  Cyclic GFR-binding peptide
  MOD_RES (6), (7): Xaa is C or S
YVPKPXXAPTKLEPLTVLYYDDSSN

SEQ ID NO: 8393 - protein, 26 aa, Artificial Sequence
  Cyclic GFR-binding peptide
  MOD_RES (6), (7): Xaa is C or S
SIPKAXXVPTELSPISMLFIDEYDKV

SEQ ID NO: 8394 - protein, 24 aa, Artificial Sequence
  Cyclic GFR-binding peptide
  MOD_RES (6), (7): Xaa is C or S
ASASPXXVSQDLSPISILFIIGKT

SEQ ID NO: 8395 - protein, 19 aa, Artificial Sequence
  Cyclic GFR-binding peptide
PQDLEPLPIVYYVGRTPKV

SEQ ID NO: 8396 - protein, 22 aa, Artificial Sequence
  Cyclic GFR-binding peptide
  MOD_RES (6), (7): Xaa is C or S
KIPKAXXVPTELSPISMLFIDE

SEQ ID NO: 8397 - protein, 18 aa, Artificial Sequence
  Cyclic GFR-binding peptide
  MOD_RES (5), (5): Xaa is C or S
TKPTXAPTKLEPLPVVYY

SEQ ID NO: 8398 - protein, 18 aa, Artificial Sequence
  Cyclic GFR-binding peptide
TRLEPLPIVYYDSANNVV

SEQ ID NO: 8399 - protein, 16 aa, Artificial Sequence
  Cyclic GFR-binding peptide
LEPLPMVYYDEYDKVV

SEQ ID NO: 8400 - protein, 15 aa, Artificial Sequence
  Cyclic GFR-binding peptide
  MOD_RES (1), (2): Xaa is C or S
XXVPQALEPLTILYY

SEQ ID NO: 8401 - protein, 13 aa, Artificial Sequence
  Cyclic GFR-binding peptide
APTKLEPLTVLYY

SEQ ID NO: 8402 - protein, 14 aa, Artificial Sequence
  Cyclic GFR-binding peptide
  MOD_RES (1), (1): Xaa is C or S
XVPQALEPLTILYY

SEQ ID NO: 8403 - protein, 17 aa, Artificial Sequence
  Cyclic GFR-binding peptide
  MOD_RES (3), (4): Xaa is C or S
SPXXVSQDLSPISILFI

SEQ ID NO: 8404 - protein, 25 aa, Artificial Sequence
  Cyclic GFR-binding peptide
  MOD_RES (6), (7): Xaa is C or S
TVPKPXXAPTQLEPLPVVYYDDSSN

SEQ ID NO: 8405 - protein, 26 aa, Artificial Sequence
  Cyclic GFR-binding peptide
  MOD_RES (6), (7): Xaa is C or S
STPPTXXVPTRLEPLTILYYDSANNV

SEQ ID NO: 8406 - protein, 21 aa, Artificial Sequence
  Cyclic GFR-binding peptide
  MOD_RES (6), (7): Xaa is C or S
SIPKAXXVPTELEPLTMLYYD

SEQ ID NO: 8407 - protein, 27 aa, Artificial Sequence
  Cyclic GFR-binding peptide
  MOD_RES (6), (7): Xaa is C or S
STPPTXXVPTRLEPLTILYYDSANNVV

SEQ ID NO: 8408 - protein, 19 aa, Artificial Sequence
  Cyclic GFR-binding peptide
PTRLEPLTILYYDSANNVV

SEQ ID NO: 8409 - protein, 18 aa, Artificial Sequence
  Cyclic GFR-binding peptide
TKLEPLPVVYYDDSSNVI

SEQ ID NO: 8410 - protein, 25 aa, Artificial Sequence
  Cyclic GFR-binding peptide
  MOD_RES (6), (7): Xaa is C or S
TVPKPXXAPTQLSPISVLFIDDSSN

SEQ ID NO: 8411 - protein, 15 aa, Artificial Sequence
  Cyclic GFR-binding peptide
SPISILFIIGKTPKI

SEQ ID NO: 8412 - protein, 23 aa, Artificial Sequence
  Cyclic GFR-binding peptide
  MOD_RES (6), (7): Xaa is C or S
STPPTXXVPTRLSAISILYLDSA

SEQ ID NO: 8413 - protein, 18 aa, Artificial Sequence
  Cyclic GFR-binding peptide
  MOD_RES (4), (5): Xaa is C or S
PKPXXAPTQLEPLPVVYY

SEQ ID NO: 8414 - protein, 16 aa, Artificial Sequence
  Cyclic GFR-binding peptide
LEPLTVLYYDDSSNVI

SEQ ID NO: 8415 - protein, 17 aa, Artificial Sequence
  Cyclic GFR-binding peptide
  MOD_RES (3), (4): Xaa is C or S
PTXXVPTRLNAISILYF

SEQ ID NO: 8416 - protein, 18 aa, Artificial Sequence
  Cyclic GFR-binding peptide
TQLEPLPVVYYDDSSNVI

SEQ ID NO: 8417 - protein, 24 aa, Artificial Sequence
  Cyclic GFR-binding peptide
  MOD_RES (6), (7): Xaa is C or S
TVPKPXXAPTQLEPLTVLYYDDSS

SEQ ID NO: 8418 - protein, 13 aa, Artificial Sequence
  Cyclic GFR-binding peptide
APTQLEPLPVVYY

SEQ ID NO: 8419 - protein, 16 aa, Artificial Sequence
  Cyclic GFR-binding peptide
  MOD_RES (2), (3): Xaa is C or S
PXXVSQDLSPISILFI

SEQ ID NO: 8420 - protein, 21 aa, Artificial Sequence
  Cyclic GFR-binding peptide
  MOD_RES (6), (7): Xaa is C or S
TVPKPXXAPTQLEPLTVLYYD

SEQ ID NO: 8421 - protein, 16 aa, Artificial Sequence
  Cyclic GFR-binding peptide
  MOD_RES (2), (3): Xaa is C or S
AXXVPTELEPLPMVYY

SEQ ID NO: 8422 - protein, 18 aa, Artificial Sequence
  Cyclic GFR-binding peptide
  MOD_RES (4), (5): Xaa is C or S
PPTXXVPTRLSAISILYL

SEQ ID NO: 8423 - protein, 18 aa, Artificial Sequence
  Cyclic GFR-binding peptide
QDLSPISILFIVGRTPKV

SEQ ID NO: 8424 - protein, 14 aa, Artificial Sequence
  Cyclic GFR-binding peptide
  MOD_RES (1), (1): Xaa is C or S
XVPTELSPISMLFI

SEQ ID NO: 8425 - protein, 14 aa, Artificial Sequence
  Cyclic GFR-binding peptide
  MOD_RES (1), (1): Xaa is C or S
XVPQALSPISILFI

SEQ ID NO: 8426 - protein, 13 aa, Artificial Sequence
  Cyclic GFR-binding peptide
VPQDLEPLPIVYY

SEQ ID NO: 8427 - protein, 22 aa, Artificial Sequence
  Cyclic GFR-binding peptide
  MOD_RES (6), (7): Xaa is C or S
TVPKPXXAPTQLEPLTVLYYDD

SEQ ID NO: 8428 - protein, 17 aa, Artificial Sequence
  Cyclic GFR-binding peptide
RLEPLPIVYYDSANNVV

SEQ ID NO: 8429 - protein, 17 aa, Artificial Sequence
  Cyclic GFR-binding peptide
  MOD_RES (3), (4): Xaa is C or S
KPXXAPTQLEPLTVLYY

SEQ ID NO: 8430 - protein, 18 aa, Artificial Sequence
  Cyclic GFR-binding peptide
  MOD_RES (5), (5): Xaa is C or S
TKPTXAPTKLEPLTVLYY

SEQ ID NO: 8431 - protein, 16 aa, Artificial Sequence
  Cyclic GFR-binding peptide
  MOD_RES (2), (3): Xaa is C or S
PXXAPTKLEPLPVVYY

SEQ ID NO: 8432 - protein, 15 aa, Artificial Sequence
  Cyclic GFR-binding peptide
SPISMLFIDEYDKVV

SEQ ID NO: 8433 - protein, 13 aa, Artificial Sequence
  Cyclic GFR-binding peptide
VPTRLSAISILYL

SEQ ID NO: 8434 - protein, 16 aa, Artificial Sequence
  Cyclic GFR-binding peptide
  MOD_RES (3), (3): Xaa is C or S
PTXAPTKLEPLTVLYY

SEQ ID NO: 8435 - protein, 19 aa, Artificial Sequence
  Cyclic GFR-binding peptide
  MOD_RES (5), (6): Xaa is C or S
SASPXXVPQDLSPISILFI

SEQ ID NO: 8436 - protein, 20 aa, Artificial Sequence
  Cyclic GFR-binding peptide
  MOD_RES (6), (7): Xaa is C or S
YVPKPXXAPTKLSPISVLFI

SEQ ID NO: 8437 - protein, 16 aa, Artificial Sequence
  Cyclic GFR-binding peptide
  MOD_RES (2), (3): Xaa is C or S
AXXVPTELSPISMLFI

SEQ ID NO: 8438 - protein, 13 aa, Artificial Sequence
  Cyclic GFR-binding peptide
VPTELEPLTMLYY

SEQ ID NO: 8439 - protein, 15 aa, Artificial Sequence
  Cyclic GFR-binding peptide
  MOD_RES (1), (2): Xaa is C or S
XXVPTELEPLTMLYY

SEQ ID NO: 8440 - protein, 24 aa, Artificial Sequence
  Cyclic GFR-binding peptide
  MOD_RES (6), (7): Xaa is C or S
ASAAPXXVPQALEPLTILYYVGRK

SEQ ID NO: 8441 - protein, 15 aa, Artificial Sequence
  Cyclic GFR-binding peptide
  MOD_RES (1), (2): Xaa is C or S
XXVSQDLSPISILFI

SEQ ID NO: 8442 - protein, 18 aa, Artificial Sequence
  Cyclic GFR-binding peptide
TKLSPISVLFIDDSSNVI

SEQ ID NO: 8443 - protein, 17 aa, Artificial Sequence
  Cyclic GFR-binding peptide
  MOD_RES (4), (4): Xaa is C or S
KPTXAPTKLSPISVLFI

SEQ ID NO: 8444 - protein, 17 aa, Artificial Sequence
  Cyclic GFR-binding peptide
  MOD_RES (3), (4): Xaa is C or S
KPXXAPTQLEPLPVVYY

SEQ ID NO: 8445 - protein, 14 aa, Artificial Sequence
  Cyclic GFR-binding peptide
  MOD_RES (1), (1): Xaa is C or S
XAPTQLEPLPVVYY

SEQ ID NO: 8446 - protein, 18 aa, Artificial Sequence
  Cyclic GFR-binding peptide
TELEPLTMLYYDENEKVV

SEQ ID NO: 8447 - protein, 17 aa, Artificial Sequence
  Cyclic GFR-binding peptide
  MOD_RES (4), (4): Xaa is C or S
KPTXAPTKLEPLPVVYY

SEQ ID NO: 8448 - protein, 18 aa, Artificial Sequence
  Cyclic GFR-binding peptide
TQLSPISVLFIDDSSNVI

SEQ ID NO: 8449 - protein, 19 aa, Artificial Sequence
  Cyclic GFR-binding peptide
  MOD_RES (5), (6): Xaa is C or S
IPKAXXVPTELSPISMLFI

SEQ ID NO: 8450 - protein, 26 aa, Artificial Sequence
  Cyclic GFR-binding peptide
  MOD_RES (6), (7): Xaa is C or S
TVPKPXXAPTQLEPLPVVYYDDSSNV

SEQ ID NO: 8451 - protein, 19 aa, Artificial Sequence
  Cyclic GFR-binding peptide
  MOD_RES (5), (6): Xaa is C or S
TPPTXXVPTRLSAISILYL

SEQ ID NO: 8452 - protein, 16 aa, Artificial Sequence
  Cyclic GFR-binding peptide
  MOD_RES (3), (3): Xaa is C or S
PTXAPTKLEPLPVVYY

SEQ ID NO: 8453 - protein, 17 aa, Artificial Sequence
  Cyclic GFR-binding peptide
  MOD_RES (3), (4): Xaa is C or S
SPXXVSQDLEPLPIVYY

SEQ ID NO: 8454 - protein, 16 aa, Artificial Sequence
  Cyclic GFR-binding peptide
  MOD_RES (2), (3): Xaa is C or S
PXXAPTKLEPLTVLYY

SEQ ID NO: 8455 - protein, 25 aa, Artificial Sequence
  Cyclic GFR-binding peptide
  MOD_RES (7), (7): Xaa is C or S
HVTKPTXAPTKLEPLTVLYYDDSSN

SEQ ID NO: 8456 - protein, 23 aa, Artificial Sequence
  Cyclic GFR-binding peptide
  MOD_RES (6), (7): Xaa is C or S
TVPKPXXAPTQLEPLPVVYYDDS

SEQ ID NO: 8457 - protein, 15 aa, Artificial Sequence
  Cyclic GFR-binding peptide
EPLPMVYYDENEKVV

SEQ ID NO: 8458 - protein, 19 aa, Artificial Sequence
  Cyclic GFR-binding peptide
  MOD_RES (5), (6): Xaa is C or S
SAAPXXVPQALSPISILFI

SEQ ID NO: 8459 - protein, 13 aa, Artificial Sequence
  Cyclic GFR-binding peptide
VPQDLSPISILFI

SEQ ID NO: 8460 - protein, 13 aa, Artificial Sequence
  Cyclic GFR-binding peptide
VPTELSPISMLFI

SEQ ID NO: 8461 - protein, 17 aa, Artificial Sequence
  Cyclic GFR-binding peptide
ELSPISMLFIDEYDKVV

SEQ ID NO: 8462 - protein, 16 aa, Artificial Sequence
  Cyclic GFR-binding peptide
  MOD_RES (2), (3): Xaa is C or S
TXXVPTRLEPLTILYY

SEQ ID NO: 8463 - protein, 26 aa, Artificial Sequence
  Cyclic GFR-binding peptide
  MOD_RES (6), (7): Xaa is C or S
ASAAPXXVPQALEPLTILYYVGRKPK

SEQ ID NO: 8464 - protein, 21 aa, Artificial Sequence
  Cyclic GFR-binding peptide
  MOD_RES (6), (7): Xaa is C or S
ASASPXXVSQDLSPISILFII

SEQ ID NO: 8465 - protein, 16 aa, Artificial Sequence
  Cyclic GFR-binding peptide
  MOD_RES (3), (3): Xaa is C or S
PTXAPTKLSPISVLFI

SEQ ID NO: 8466 - protein, 17 aa, Artificial Sequence
  Cyclic GFR-binding peptide
  MOD_RES (4), (4): Xaa is C or S
KPTXAPTKLEPLTVLYY

SEQ ID NO: 8467 - protein, 14 aa, Artificial Sequence
  Cyclic GFR-binding peptide
  MOD_RES (1), (1): Xaa is C or S
XVSQDLSPISILFI

SEQ ID NO: 8468 - protein, 17 aa, Artificial Sequence
  Cyclic GFR-binding peptide
ELEPLPMVYYDENEKVV

SEQ ID NO: 8469 - protein, 18 aa, Artificial Sequence
  Cyclic GFR-binding peptide
QALSPISILFIVGRKPKV

SEQ ID NO: 8470 - protein, 16 aa, Artificial Sequence
  Cyclic GFR-binding peptide
  MOD_RES (2), (3): Xaa is C or S
AXXVPTELEPLTMLYY

SEQ ID NO: 8471 - protein, 16 aa, Artificial Sequence
  Cyclic GFR-binding peptide
LEPLPIVYYVGRTPKV

SEQ ID NO: 8472 - protein, 25 aa, Artificial Sequence
  Cyclic GFR-binding peptide
  MOD_RES (6), (7): Xaa is C or S
SIPKAXXVPTELEPLPMVYYDEYDK

SEQ ID NO: 8473 - protein, 14 aa, Artificial Sequence
  Cyclic GFR-binding peptide
  MOD_RES (1), (1): Xaa is C or S
XAPTQLEPLTVLYY

SEQ ID NO: 8474 - protein, 15 aa, Artificial Sequence
  Cyclic GFR-binding peptide
  MOD_RES (1), (2): Xaa is C or S
XXVPQDLEPLPIVYY

SEQ ID NO: 8475 - protein, 13 aa, Artificial Sequence
  Cyclic GFR-binding peptide
VSQDLSPISILFI

SEQ ID NO: 8476 - protein, 19 aa, Artificial Sequence
  Cyclic GFR-binding peptide
  MOD_RES (5), (6): Xaa is C or S
IPKAXXVPTELEPLTMLYY

SEQ ID NO: 8477 - protein, 15 aa, Artificial Sequence
  Cyclic GFR-binding peptide
  MOD_RES (1), (2): Xaa is C or S
XXVPQALSPISILFI

SEQ ID NO: 8478 - protein, 26 aa, Artificial Sequence
  Cyclic GFR-binding peptide
  MOD_RES (6), (7): Xaa is C or S
ASASPXXVSQDLSPISILFIIGKTPK

SEQ ID NO: 8479 - protein, 19 aa, Artificial Sequence
  Cyclic GFR-binding peptide
PTELEPLTMLYYDENEKVV

SEQ ID NO: 8480 - protein, 27 aa, Artificial Sequence
  Cyclic GFR-binding peptide
  MOD_RES (6), (7): Xaa is C or S
ASASPXXVSQDLSPISILFIIGKTPKI

SEQ ID NO: 8481 - protein, 23 aa, Artificial Sequence
  Cyclic GFR-binding peptide
  MOD_RES (6), (7): Xaa is C or S
KIPKAXXVPTELSPISMLFIDEN

SEQ ID NO: 8482 - protein, 16 aa, Artificial Sequence
  Cyclic GFR-binding peptide
  MOD_RES (2), (3): Xaa is C or S
PXXAPTKLSPISVLFI

SEQ ID NO: 8483 - protein, 17 aa, Artificial Sequence
  Cyclic GFR-binding peptide
  MOD_RES (3), (4): Xaa is C or S
APXXVPQALEPLTILYY

SEQ ID NO: 8484 - protein, 19 aa, Artificial Sequence
  Cyclic GFR-binding peptide
  MOD_RES (5), (6): Xaa is C or S
SASPXXVPQDLEPLPIVYY

SEQ ID NO: 8485 - protein, 27 aa, Artificial Sequence
  Cyclic GFR-binding peptide
  MOD_RES (6), (7): Xaa is C or S
YVPKPXXAPTKLEPLTVLYYDDSSNVI

SEQ ID NO: 8486 - protein, 19 aa, Artificial Sequence
  Cyclic GFR-binding peptide
PTELSPISMLFIDEYDKVV

SEQ ID NO: 8487 - protein, 26 aa, Artificial Sequence
  Cyclic GFR-binding peptide
  MOD_RES (6), (7): Xaa is C or S
KIPKAXXVPTELEPLTMLYYDENEKV

SEQ ID NO: 8488 - protein, 14 aa, Artificial Sequence
  Cyclic GFR-binding peptide
  MOD_RES (1), (1): Xaa is C or S
XAPTQLSPISVLFI

SEQ ID NO: 8489 - protein, 19 aa, Artificial Sequence
  Cyclic GFR-binding peptide
  MOD_RES (5), (6): Xaa is C or S
VPKPXXAPTQLSPISVLFI

SEQ ID NO: 8490 - protein, 17 aa, Artificial Sequence
  Cyclic GFR-binding peptide
DLSPISILFIIGKTPKI

SEQ ID NO: 8491 - protein, 20 aa, Artificial Sequence
  Cyclic GFR-binding peptide
  MOD_RES (6), (7): Xaa is C or S
TVPKPXXAPTQLSPISVLFI

SEQ ID NO: 8492 - protein, 14 aa, Artificial Sequence
  Cyclic GFR-binding peptide
  MOD_RES (1), (1): Xaa is C or S
XVSQDLEPLPIVYY

SEQ ID NO: 8493 - protein, 24 aa, Artificial Sequence
  Cyclic GFR-binding peptide
  MOD_RES (7), (7): Xaa is C or S
HVTKPTXAPTKLSPISVLFIDDSS

SEQ ID NO: 8494 - protein, 13 aa, Artificial Sequence
  Cyclic GFR-binding peptide
VPTELEPLPMVYY

SEQ ID NO: 8495 - protein, 15 aa, Artificial Sequence
  Cyclic GFR-binding peptide
  MOD_RES (1), (2): Xaa is C or S
XXVPTELEPLPMVYY

SEQ ID NO: 8496 - protein, 27 aa, Artificial Sequence
  Cyclic GFR-binding peptide
  MOD_RES (7), (7): Xaa is C or S
HVTKPTXAPTKLSPISVLFIDDSSNVI

SEQ ID NO: 8497 - protein, 23 aa, Artificial Sequence
  Cyclic GFR-binding peptide
  MOD_RES (7), (7): Xaa is C or S
HVTKPTXAPTKLEPLPVVYYDDS

SEQ ID NO: 8498 - protein, 13 aa, Artificial Sequence
  Cyclic GFR-binding peptide
APTQLSPISVLFI

SEQ ID NO: 8499 - protein, 18 aa, Artificial Sequence
  Cyclic GFR-binding peptide
QDLSPISILFIIGKTPKI

SEQ ID NO: 8500 - protein, 25 aa, Artificial Sequence
  Cyclic GFR-binding peptide
  MOD_RES (6), (7): Xaa is C or S
ASAAPXXVPQALSPISILFIVGRKP

SEQ ID NO: 8501 - protein, 21 aa, Artificial Sequence
  Cyclic GFR-binding peptide
  MOD_RES (6), (7): Xaa is C or S
STPPTXXVPTRLNAISILYFD

SEQ ID NO: 8502 - protein, 16 aa, Artificial Sequence
  Cyclic GFR-binding peptide
LEPLPMVYYDENEKVV

SEQ ID NO: 8503 - protein, 16 aa, Artificial Sequence
  Cyclic GFR-binding peptide
LSPISMLFIDEYDKVV

SEQ ID NO: 8504 - protein, 13 aa, Artificial Sequence
  Cyclic GFR-binding peptide
VSQDLEPLPIVYY

SEQ ID NO: 8505 - protein, 26 aa, Artificial Sequence
  Cyclic GFR-binding peptide
  MOD_RES (6), (7): Xaa is C or S
ASASPXXVPQDLSPISILFIVGRTPK

SEQ ID NO: 8506 - protein, 19 aa, Artificial Sequence
  Cyclic GFR-binding peptide
  MOD_RES (5), (6): Xaa is C or S
VPKPXXAPTQLEPLTVLYY

SEQ ID NO: 8507 - protein, 14 aa, Artificial Sequence
  Cyclic GFR-binding peptide
  MOD_RES (1), (1): Xaa is C or S
XVPTELEPLTMLYY

SEQ ID NO: 8508 - protein, 27 aa, Artificial Sequence
  Cyclic GFR-binding peptide
  MOD_RES (6), (7): Xaa is C or S
ASASPXXVPQDLEPLPIVYYVGRTPKV

SEQ ID NO: 8509 - protein, 20 aa, Artificial Sequence
  Cyclic GFR-binding peptide
  MOD_RES (6), (7): Xaa is C or S
YVPKPXXAPTKLEPLTVLYY

SEQ ID NO: 8510 - protein, 14 aa, Artificial Sequence
  Cyclic GFR-binding peptide
  MOD_RES (1), (1): Xaa is C or S
XVPTELEPLPMVYY

SEQ ID NO: 8511 - protein, 25 aa, Artificial Sequence
  Cyclic GFR-binding peptide
  MOD_RES (6), (7): Xaa is C or S
SIPKAXXVPTELEPLTMLYYDEYDK

SEQ ID NO: 8512 - protein, 17 aa, Artificial Sequence
  Cyclic GFR-binding peptide
  MOD_RES (3), (4): Xaa is C or S
SPXXVPQDLEPLPIVYY

SEQ ID NO: 8513 - protein, 13 aa, Artificial Sequence
  Cyclic GFR-binding peptide
VPQALSPISILFI

SEQ ID NO: 8514 - protein, 17 aa, Artificial Sequence
  Cyclic GFR-binding peptide
RLNAISILYFDSANNVV

SEQ ID NO: 8515 - protein, 16 aa, Artificial Sequence
  Cyclic GFR-binding peptide
  MOD_RES (2), (3): Xaa is C or S
TXXVPTRLNAISILYF

SEQ ID NO: 8516 - protein, 17 aa, Artificial Sequence
  Cyclic GFR-binding peptide
ALSPISILFIVGRKPKV

SEQ ID NO: 8517 - protein, 15 aa, Artificial Sequence
  Cyclic GFR-binding peptide
  MOD_RES (1), (2): Xaa is C or S
XXVSQDLEPLPIVYY

SEQ ID NO: 8518 - protein, 18 aa, Artificial Sequence
  Cyclic GFR-binding peptide
TRLEPLTILYYDSANNVV

SEQ ID NO: 8519 - protein, 20 aa, Artificial Sequence
  Cyclic GFR-binding peptide
  MOD_RES (6), (7): Xaa is C or S
TVPKPXXAPTQLEPLTVLYY

SEQ ID NO: 8520 - protein, 26 aa, Artificial Sequence
  Cyclic GFR-binding peptide
  MOD_RES (7), (7): Xaa is C or S
HVTKPTXAPTKLEPLPVVYYDDSSNV

SEQ ID NO: 8521 - protein, 19 aa, Artificial Sequence
  Cyclic GFR-binding peptide
PQDLSPISILFIVGRTPKV

SEQ ID NO: 8522 - protein, 16 aa, Artificial Sequence
  Cyclic GFR-binding peptide
LSPISMLFIDENEKVV

SEQ ID NO: 8523 - protein, 15 aa, Artificial Sequence
  Cyclic GFR-binding peptide
  MOD_RES (1), (2): Xaa is C or S
XXVPQDLSPISILFI

SEQ ID NO: 8524 - protein, 19 aa, Artificial Sequence
  Cyclic GFR-binding peptide
  MOD_RES (5), (6): Xaa is C or S
SAAPXXVPQALEPLTILYY

SEQ ID NO: 8525 - protein, 14 aa, Artificial Sequence
  Cyclic GFR-binding peptide
  MOD_RES (1), (1): Xaa is C or S
XVPQDLSPISILFI

SEQ ID NO: 8526 - protein, 19 aa, Artificial Sequence
  Cyclic GFR-binding peptide
PQALSPISILFIVGRKPKV

SEQ ID NO: 8527 - protein, 22 aa, Artificial Sequence
  Cyclic GFR-binding peptide
  MOD_RES (6), (7): Xaa is C or S
STPPTXXVPTRLNAISILYFDS

SEQ ID NO: 8528 - protein, 17 aa, Artificial Sequence
  Cyclic GFR-binding peptide
  MOD_RES (3), (4): Xaa is C or S
PTXXVPTRLEPLTILYY

SEQ ID NO: 8529 - protein, 16 aa, Artificial Sequence
  Cyclic GFR-binding peptide
LEPLTILYYDSANNVV

SEQ ID NO: 8530 - protein, 23 aa, Artificial Sequence
  Cyclic GFR-binding peptide
  MOD_RES (7), (7): Xaa is C or S
HVTKPTXAPTKLSPISVLFIDDS

SEQ ID NO: 8531 - protein, 24 aa, Artificial Sequence
  Cyclic GFR-binding peptide
  MOD_RES (6), (7): Xaa is C or S
ASASPXXVSQDLEPLPIVYYIGKT

SEQ ID NO: 8532 - protein, 21 aa, Artificial Sequence
  Cyclic GFR-binding peptide
  MOD_RES (7), (7): Xaa is C or S
HVTKPTXAPTKLEPLTVLYYD

SEQ ID NO: 8533 - protein, 25 aa, Artificial Sequence
  Cyclic GFR-binding peptide
  MOD_RES (6), (7): Xaa is C or S
YVPKPXXAPTKLSPISVLFIDDSSN

SEQ ID NO: 8534 - protein, 21 aa, Artificial Sequence
  Cyclic GFR-binding peptide
  MOD_RES (6), (7): Xaa is C or S
ASASPXXVPQDLSPISILFIV

SEQ ID NO: 8535 - protein, 18 aa, Artificial Sequence
  Cyclic GFR-binding peptide
  MOD_RES (4), (5): Xaa is C or S
PPTXXVPTRLEPLPIVYY

SEQ ID NO: 8536 - protein, 19 aa, Artificial Sequence
  Cyclic GFR-binding peptide
PTRLEPLPIVYYDSANNVV

SEQ ID NO: 8537 - protein, 15 aa, Artificial Sequence
  Cyclic GFR-binding peptide
  MOD_RES (1), (2): Xaa is C or S
XXAPTQLSPISVLFI

SEQ ID NO: 8538 - protein, 15 aa, Artificial Sequence
  Cyclic GFR-binding peptide
EPLTMLYYDENEKVV

SEQ ID NO: 8539 - protein, 24 aa, Artificial Sequence
  Cyclic GFR-binding peptide
  MOD_RES (6), (7): Xaa is C or S
STPPTXXVPTRLEPLTILYYDSAN

SEQ ID NO: 8540 - protein, 23 aa, Artificial Sequence
  Cyclic GFR-binding peptide
  MOD_RES (6), (7): Xaa is C or S
ASAAPXXVPQALEPLTILYYVGR

SEQ ID NO: 8541 - protein, 25 aa, Artificial Sequence
  Cyclic GFR-binding peptide
  MOD_RES (6), (7): Xaa is C or S
ASASPXXVSQDLSPISILFIIGKTP

SEQ ID NO: 8542 - protein, 16 aa, Artificial Sequence
  Cyclic GFR-binding peptide
  MOD_RES (2), (3): Xaa is C or S
TXXVPTRLSAISILYL

SEQ ID NO: 8543 - protein, 18 aa, Artificial Sequence
  Cyclic GFR-binding peptide
  MOD_RES (5), (5): Xaa is C or S
TKPTXAPTKLSPISVLFI

SEQ ID NO: 8544 - protein, 19 aa, Artificial Sequence
  Cyclic GFR-binding peptide
  MOD_RES (5), (6): Xaa is C or S
IPKAXXVPTELEPLPMVYY

SEQ ID NO: 8545 - protein, 24 aa, Artificial Sequence
  Cyclic GFR-binding peptide
  MOD_RES (6), (7): Xaa is C or S
SIPKAXXVPTELEPLTMLYYDEYD

SEQ ID NO: 8546 - protein, 16 aa, Artificial Sequence
  Cyclic GFR-binding peptide
LEPLTILYYVGRKPKV

SEQ ID NO: 8547 - protein, 17 aa, Artificial Sequence
  Cyclic GFR-binding peptide
DLSPISILFIVGRTPKV

SEQ ID NO: 8548 - protein, 19 aa, Artificial Sequence
  Cyclic GFR-binding peptide
  MOD_RES (5), (6): Xaa is C or S
SASPXXVSQDLEPLPIVYY

SEQ ID NO: 8549 - protein, 18 aa, Artificial Sequence
  Cyclic GFR-binding peptide
TELEPLPMVYYDEYDKVV

SEQ ID NO: 8550 - protein, 27 aa, Artificial Sequence
  Cyclic GFR-binding peptide
  MOD_RES (6), (7): Xaa is C or S
TVPKPXXAPTQLEPLTVLYYDDSSNVI

SEQ ID NO: 8551 - protein, 17 aa, Artificial Sequence
  Cyclic GFR-binding peptide
  MOD_RES (3), (4): Xaa is C or S
KPXXAPTQLSPISVLFI

SEQ ID NO: 8552 - protein, 20 aa, Artificial Sequence
  Cyclic GFR-binding peptide
  MOD_RES (6), (7): Xaa is C or S
YVPKPXXAPTKLEPLPVVYY

SEQ ID NO: 8553 - protein, 27 aa, Artificial Sequence
  Cyclic GFR-binding peptide
  MOD_RES (6), (7): Xaa is C or S
KIPKAXXVPTELSPISMLFIDENEKVV

SEQ ID NO: 8554 - protein, 27 aa, Artificial Sequence
  Cyclic GFR-binding peptide
  MOD_RES (6), (7): Xaa is C or S
STPPTXXVPTRLNAISILYFDSANNVV

SEQ ID NO: 8555 - protein, 26 aa, Artificial Sequence
  Cyclic GFR-binding peptide
  MOD_RES (6), (7): Xaa is C or S
ASASPXXVSQDLEPLPIVYYIGKTPK

SEQ ID NO: 8556 - protein, 20 aa, Artificial Sequence
  Cyclic GFR-binding peptide
  MOD_RES (6), (7): Xaa is C or S
STPPTXXVPTRLEPLTILYY

SEQ ID NO: 8557 - protein, 24 aa, Artificial Sequence
  Cyclic GFR-binding peptide
  MOD_RES (6), (7): Xaa is C or S
KIPKAXXVPTELSPISMLFIDENE

SEQ ID NO: 8558 - protein, 25 aa, Artificial Sequence
  Cyclic GFR-binding peptide
  MOD_RES (6), (7): Xaa is C or S
STPPTXXVPTRLEPLTILYYDSANN

SEQ ID NO: 8559 - protein, 22 aa, Artificial Sequence
  Cyclic GFR-binding peptide
  MOD_RES (6), (7): Xaa is C or S
ASASPXXVSQDLSPISILFIIG

SEQ ID NO: 8560 - protein, 23 aa, Artificial Sequence
  Cyclic GFR-binding peptide
  MOD_RES (6), (7): Xaa is C or S
KIPKAXXVPTELEPLTMLYYDEN

SEQ ID NO: 8561 - protein, 26 aa, Artificial Sequence
  Cyclic GFR-binding peptide
  MOD_RES (6), (7): Xaa is C or S
STPPTXXVPTRLNAISILYFDSANNV

SEQ ID NO: 8562 - protein, 18 aa, Artificial Sequence
  Cyclic GFR-binding peptide
  MOD_RES (4), (5): Xaa is C or S
PKAXXVPTELEPLPMVYY

SEQ ID NO: 8563 - protein, 23 aa, Artificial Sequence
  Cyclic GFR-binding peptide
  MOD_RES (6), (7): Xaa is C or S
SIPKAXXVPTELSPISMLFIDEY

SEQ ID NO: 8564 - protein, 21 aa, Artificial Sequence
  Cyclic GFR-binding peptide
  MOD_RES (6), (7): Xaa is C or S
KIPKAXXVPTELEPLTMLYYD

SEQ ID NO: 8565 - protein, 18 aa, Artificial Sequence
  Cyclic GFR-binding peptide
  MOD_RES (4), (5): Xaa is C or S
ASPXXVSQDLEPLPIVYY

SEQ ID NO: 8566 - protein, 17 aa, Artificial Sequence
  Cyclic GFR-binding peptide
ELEPLTMLYYDENEKVV

SEQ ID NO: 8567 - protein, 23 aa, Artificial Sequence
  Cyclic GFR-binding peptide
  MOD_RES (7), (7): Xaa is C or S
HVTKPTXAPTKLEPLTVLYYDDS

SEQ ID NO: 8568 - protein, 27 aa, Artificial Sequence
  Cyclic GFR-binding peptide
  MOD_RES (6), (7): Xaa is C or S
STPPTXXVPTRLSAISILYLDSANNVV

SEQ ID NO: 8569 - protein, 15 aa, Artificial Sequence
  Cyclic GFR-binding peptide
SPISVLFIDDSSNVI

SEQ ID NO: 8570 - protein, 23 aa, Artificial Sequence
  Cyclic GFR-binding peptide
  MOD_RES (6), (7): Xaa is C or S
STPPTXXVPTRLEPLTILYYDSA

SEQ ID NO: 8571 - protein, 13 aa, Artificial Sequence
  Cyclic GFR-binding peptide
VPQALEPLTILYY

SEQ ID NO: 8572 - protein, 17 aa, Artificial Sequence
  Cyclic GFR-binding peptide
  MOD_RES (3), (4): Xaa is C or S
PTXXVPTRLEPLPIVYY

SEQ ID NO: 8573 - protein, 15 aa, Artificial Sequence
  Cyclic GFR-binding peptide
EPLPIVYYVGRTPKV

SEQ ID NO: 8574 - protein, 15 aa, Artificial Sequence
  Cyclic GFR-binding peptide
EPLPMVYYDEYDKVV

SEQ ID NO: 8575 - protein, 26 aa, Artificial Sequence
  Cyclic GFR-binding peptide
  MOD_RES (6), (7): Xaa is C or S
KIPKAXXVPTELSPISMLFIDENEKV

SEQ ID NO: 8576 - protein, 16 aa, Artificial Sequence
  Cyclic GFR-binding peptide
LEPLPIVYYDSANNVV

SEQ ID NO: 8577 - protein, 15 aa, Artificial Sequence
  Cyclic GFR-binding peptide
EPLTVLYYDDSSNVI

SEQ ID NO: 8578 - protein, 19 aa, Artificial Sequence
  Cyclic GFR-binding peptide
PTRLSAISILYLDSANNVV

SEQ ID NO: 8579 - protein, 24 aa, Artificial Sequence
  Cyclic GFR-binding peptide
  MOD_RES (6), (7): Xaa is C or S
SIPKAXXVPTELEPLPMVYYDEYD

SEQ ID NO: 8580 - protein, 18 aa, Artificial Sequence
  Cyclic GFR-binding peptide
  MOD_RES (4), (5): Xaa is C or S
PKAXXVPTELEPLTMLYY

SEQ ID NO: 8581 - protein, 17 aa, Artificial Sequence
  Cyclic GFR-binding peptide
  MOD_RES (3), (4): Xaa is C or S
APXXVPQALSPISILFI

SEQ ID NO: 8582 - protein, 20 aa, Artificial Sequence
  Cyclic GFR-binding peptide
  MOD_RES (6), (7): Xaa is C or S
ASASPXXVPQDLEPLPIVYY

SEQ ID NO: 8583 - protein, 14 aa, Artificial Sequence
  Cyclic GFR-binding peptide
  MOD_RES (1), (1): Xaa is C or S
XVPTRLNAISILYF

SEQ ID NO: 8584 - protein, 26 aa, Artificial Sequence
  Cyclic GFR-binding peptide
  MOD_RES (6), (7): Xaa is C or S
SIPKAXXVPTELEPLPMVYYDEYDKV

SEQ ID NO: 8585 - protein, 24 aa, Artificial Sequence
  Cyclic GFR-binding peptide
  MOD_RES (6), (7): Xaa is C or S
ASASPXXVPQDLSPISILFIVGRT

SEQ ID NO: 8586 - protein, 14 aa, Artificial Sequence
  Cyclic GFR-binding peptide
  MOD_RES (1), (1): Xaa is C or S
XVPTRLSAISILYL

SEQ ID NO: 8587 - protein, 19 aa, Artificial Sequence
  Cyclic GFR-binding peptide
PTKLSPISVLFIDDSSNVI

SEQ ID NO: 8588 - protein, 21 aa, Artificial Sequence
  Cyclic GFR-binding peptide
  MOD_RES (6), (7): Xaa is C or S
ASAAPXXVPQALEPLTILYYV

SEQ ID NO: 8589 - protein, 20 aa, Artificial Sequence
  Cyclic GFR-binding peptide
  MOD_RES (6), (7): Xaa is C or S
STPPTXXVPTRLEPLPIVYY

SEQ ID NO: 8590 - protein, 23 aa, Artificial Sequence
  Cyclic GFR-binding peptide
  MOD_RES (6), (7): Xaa is C or S
TVPKPXXAPTQLEPLTVLYYDDS

SEQ ID NO: 8591 - protein, 26 aa, Artificial Sequence
  Cyclic GFR-binding peptide
  MOD_RES (6), (7): Xaa is C or S
SIPKAXXVPTELEPLTMLYYDEYDKV

SEQ ID NO: 8592 - protein, 19 aa, Artificial Sequence
  Cyclic GFR-binding peptide
PTQLSPISVLFIDDSSNVI

SEQ ID NO: 8593 - protein, 24 aa, Artificial Sequence
  Cyclic GFR-binding peptide
  MOD_RES (6), (7): Xaa is C or S
KIPKAXXVPTELEPLTMLYYDENE

SEQ ID NO: 8594 - protein, 21 aa, Artificial Sequence
  Cyclic GFR-binding peptide
  MOD_RES (6), (7): Xaa is C or S
YVPKPXXAPTKLSPISVLFID

SEQ ID NO: 8595 - protein, 15 aa, Artificial Sequence
  Cyclic GFR-binding peptide
SPISMLFIDENEKVV

SEQ ID NO: 8596 - protein, 23 aa, Artificial Sequence
  Cyclic GFR-binding peptide
  MOD_RES (6), (7): Xaa is C or S
YVPKPXXAPTKLEPLTVLYYDDS

SEQ ID NO: 8597 - protein, 26 aa, Artificial Sequence
  Cyclic GFR-binding peptide
  MOD_RES (6), (7): Xaa is C or S
STPPTXXVPTRLSAISILYLDSANNV

SEQ ID NO: 8598 - protein, 17 aa, Artificial Sequence
  Cyclic GFR-binding peptide
  MOD_RES (3), (4): Xaa is C or S
KAXXVPTELEPLPMVYY

SEQ ID NO: 8599 - protein, 26 aa, Artificial Sequence
  Cyclic GFR-binding peptide
  MOD_RES (6), (7): Xaa is C or S
TVPKPXXAPTQLSPISVLFIDDSSNV

SEQ ID NO: 8600 - protein, 15 aa, Artificial Sequence
  Cyclic GFR-binding peptide
  MOD_RES (1), (2): Xaa is C or S
XXAPTQLEPLPVVYY

SEQ ID NO: 8601 - protein, 27 aa, Artificial Sequence
  Cyclic GFR-binding peptide
  MOD_RES (6), (7): Xaa is C or S
ASAAPXXVPQALEPLTILYYVGRKPKV

SEQ ID NO: 8602 - protein, 19 aa, Artificial Sequence
  Cyclic GFR-binding peptide
  MOD_RES (5), (6): Xaa is C or S
SASPXXVSQDLSPISILFI

SEQ ID NO: 8603 - protein, 16 aa, Artificial Sequence
  Cyclic GFR-binding peptide
LSPISILFIVGRTPKV

SEQ ID NO: 8604 - protein, 27 aa, Artificial Sequence
  Cyclic GFR-binding peptide
  MOD_RES (6), (7): Xaa is C or S
TVPKPXXAPTQLEPLPVVYYDDSSNVI

SEQ ID NO: 8605 - protein, 20 aa, Artificial Sequence
  Cyclic GFR-binding peptide
  MOD_RES (6), (7): Xaa is C or S
TVPKPXXAPTQLEPLPVVYY

SEQ ID NO: 8606 - protein, 16 aa, Artificial Sequence
  Cyclic GFR-binding peptide
  MOD_RES (2), (3): Xaa is C or S
PXXAPTQLEPLPVVYY

SEQ ID NO: 8607 - protein, 25 aa, Artificial Sequence
  Cyclic GFR-binding peptide
  MOD_RES (6), (7): Xaa is C or S
ASAAPXXVPQALEPLTILYYVGRKP

SEQ ID NO: 8608 - protein, 16 aa, Artificial Sequence
  Cyclic GFR-binding peptide
LSPISVLFIDDSSNVI

SEQ ID NO: 8609 - protein, 21 aa, Artificial Sequence
  Cyclic GFR-binding peptide
  MOD_RES (6), (7): Xaa is C or S
YVPKPXXAPTKLEPLTVLYYD

SEQ ID NO: 8610 - protein, 17 aa, Artificial Sequence
  Cyclic GFR-binding peptide
ALEPLTILYYVGRKPKV

SEQ ID NO: 8611 - protein, 26 aa, Artificial Sequence
  Cyclic GFR-binding peptide
  MOD_RES (6), (7): Xaa is C or S
YVPKPXXAPTKLEPLPVVYYDDSSNV

SEQ ID NO: 8612 - protein, 22 aa, Artificial Sequence
  Cyclic GFR-binding peptide
  MOD_RES (6), (7): Xaa is C or S
SIPKAXXVPTELEPLPMVYYDE

SEQ ID NO: 8613 - protein, 24 aa, Artificial Sequence
  Cyclic GFR-binding peptide
  MOD_RES (6), (7): Xaa is C or S
TVPKPXXAPTQLEPLPVVYYDDSS

SEQ ID NO: 8614 - protein, 19 aa, Artificial Sequence
  Cyclic GFR-binding peptide
  MOD_RES (5), (6): Xaa is C or S
VPKPXXAPTQLEPLPVVYY

SEQ ID NO: 8615 - protein, 27 aa, Artificial Sequence
  Cyclic GFR-binding peptide
  MOD_RES (6), (7): Xaa is C or S
ASASPXXVPQDLSPISILFIVGRTPKV

SEQ ID NO: 8616 - protein, 15 aa, Artificial Sequence
  Cyclic GFR-binding peptide
  MOD_RES (1), (2): Xaa is C or S
XXAPTQLEPLTVLYY

SEQ ID NO: 8617 - protein, 26 aa, Artificial Sequence
  Cyclic GFR-binding peptide
  MOD_RES (7), (7): Xaa is C or S
HVTKPTXAPTKLEPLTVLYYDDSSNV

SEQ ID NO: 8618 - protein, 15 aa, Artificial Sequence
  Cyclic GFR-binding peptide
EPLTILYYVGRKPKV

SEQ ID NO: 8619 - protein, 18 aa, Artificial Sequence
  Cyclic GFR-binding peptide
  MOD_RES (4), (5): Xaa is C or S
ASPXXVPQDLEPLPIVYY

SEQ ID NO: 8620 - protein, 21 aa, Artificial Sequence
  Cyclic GFR-binding peptide
  MOD_RES (6), (7): Xaa is C or S
STPPTXXVPTRLEPLTILYYD

SEQ ID NO: 8621 - protein, 24 aa, Artificial Sequence
  Cyclic GFR-binding peptide
  MOD_RES (6), (7): Xaa is C or S
SIPKAXXVPTELSPISMLFIDEYD

SEQ ID NO: 8622 - protein, 15 aa, Artificial Sequence
  Cyclic GFR-binding peptide
  MOD_RES (1), (2): Xaa is C or S
XXVPTRLSAISILYL

SEQ ID NO: 8623 - protein, 21 aa, Artificial Sequence
  Cyclic GFR-binding peptide
  MOD_RES (7), (7): Xaa is C or S
HVTKPTXAPTKLSPISVLFID

SEQ ID NO: 8624 - protein, 17 aa, Artificial Sequence
  Cyclic GFR-binding peptide
RLEPLTILYYDSANNVV

SEQ ID NO: 8625 - protein, 24 aa, Artificial Sequence
  Cyclic GFR-binding peptide
  MOD_RES (6), (7): Xaa is C or S
YVPKPXXAPTKLEPLTVLYYDDSS

SEQ ID NO: 8626 - protein, 15 aa, Artificial Sequence
  Cyclic GFR-binding peptide
  MOD_RES (1), (2): Xaa is C or S
XXVPTRLNAISILYF

SEQ ID NO: 8627 - protein, 22 aa, Artificial Sequence
  Cyclic GFR-binding peptide
  MOD_RES (6), (7): Xaa is C or S
STPPTXXVPTRLEPLTILYYDS

SEQ ID NO: 8628 - protein, 25 aa, Artificial Sequence
  Cyclic GFR-binding peptide
  MOD_RES (7), (7): Xaa is C or S
HVTKPTXAPTKLEPLPVVYYDDSSN

SEQ ID NO: 8629 - protein, 15 aa, Artificial Sequence
  Cyclic GFR-binding peptide
EPLPVVYYDDSSNVI

SEQ ID NO: 8630 - protein, 20 aa, Artificial Sequence
  Cyclic GFR-binding peptide
  MOD_RES (6), (7): Xaa is C or S
KIPKAXXVPTELEPLPMVYY

SEQ ID NO: 8631 - protein, 27 aa, Artificial Sequence
  Cyclic GFR-binding peptide
  MOD_RES (7), (7): Xaa is C or S
HVTKPTXAPTKLEPLTVLYYDDSSNVI

SEQ ID NO: 8632 - protein, 21 aa, Artificial Sequence
  Cyclic GFR-binding peptide
  MOD_RES (7), (7): Xaa is C or S
HVTKPTXAPTKLEPLPVVYYD

SEQ ID NO: 8633 - protein, 23 aa, Artificial Sequence
  Cyclic GFR-binding peptide
  MOD_RES (6), (7): Xaa is C or S
YVPKPXXAPTKLSPISVLFIDDS

SEQ ID NO: 8634 - protein, 16 aa, Artificial Sequence
  Cyclic GFR-binding peptide
LNAISILYFDSANNVV

SEQ ID NO: 8635 - protein, 16 aa, Artificial Sequence
  Cyclic GFR-binding peptide
LEPLPIVYYIGKTPKI

SEQ ID NO: 8636 - protein, 15 aa, Artificial Sequence
  Cyclic GFR-binding peptide
  MOD_RES (1), (2): Xaa is C or S
XXAPTKLEPLTVLYY

SEQ ID NO: 8637 - protein, 25 aa, Artificial Sequence
  Cyclic GFR-binding peptide
  MOD_RES (7), (7): Xaa is C or S
HVTKPTXAPTKLSPISVLFIDDSSN

SEQ ID NO: 8638 - protein, 20 aa, Artificial Sequence
  Cyclic GFR-binding peptide
  MOD_RES (7), (7): Xaa is C or S
HVTKPTXAPTKLEPLTVLYY

SEQ ID NO: 8639 - protein, 26 aa, Artificial Sequence
  Cyclic GFR-binding peptide
  MOD_RES (6), (7): Xaa is C or S
ASAAPXXVPQALSPISILFIVGRKPK

SEQ ID NO: 8640 - protein, 14 aa, Artificial Sequence
  Cyclic GFR-binding peptide
  MOD_RES (1), (1): Xaa is C or S
XAPTKLEPLPVVYY

SEQ ID NO: 8641 - protein, 18 aa, Artificial Sequence
  Cyclic GFR-binding peptide
TELEPLTMLYYDEYDKVV

SEQ ID NO: 8642 - protein, 16 aa, Artificial Sequence
  Cyclic GFR-binding peptide
  MOD_RES (2), (3): Xaa is C or S
TXXVPTRLEPLPIVYY

SEQ ID NO: 8643 - protein, 15 aa, Artificial Sequence
  Cyclic GFR-binding peptide
EPLTILYYDSANNVV

SEQ ID NO: 8644 - protein, 16 aa, Artificial Sequence
  Cyclic GFR-binding peptide
  MOD_RES (2), (3): Xaa is C or S
PXXAPTQLEPLTVLYY

SEQ ID NO: 8645 - protein, 17 aa, Artificial Sequence
  Cyclic GFR-binding peptide
KLEPLTVLYYDDSSNVI

SEQ ID NO: 8646 - protein, 17 aa, Artificial Sequence
  Cyclic GFR-binding peptide
ELEPLPMVYYDEYDKVV

SEQ ID NO: 8647 - protein, 19 aa, Artificial Sequence
  Cyclic GFR-binding peptide
  MOD_RES (6), (6): Xaa is C or S
VTKPTXAPTKLEPLPVVYY

SEQ ID NO: 8648 - protein, 25 aa, Artificial Sequence
  Cyclic GFR-binding peptide
  MOD_RES (6), (7): Xaa is C or S
STPPTXXVPTRLEPLPIVYYDSANN

SEQ ID NO: 8649 - protein, 23 aa, Artificial Sequence
  Cyclic GFR-binding peptide
  MOD_RES (6), (7): Xaa is C or S
TVPKPXXAPTQLSPISVLFIDDS

SEQ ID NO: 8650 - protein, 17 aa, Artificial Sequence
  Cyclic GFR-binding peptide
QLEPLTVLYYDDSSNVI

SEQ ID NO: 8651 - protein, 27 aa, Artificial Sequence
  Cyclic GFR-binding peptide
  MOD_RES (6), (7): Xaa is C or S
SIPKAXXVPTELEPLTMLYYDEYDKVV

SEQ ID NO: 8652 - protein, 22 aa, Artificial Sequence
  Cyclic GFR-binding peptide
  MOD_RES (6), (7): Xaa is C or S
TVPKPXXAPTQLSPISVLFIDD

SEQ ID NO: 8653 - protein, 22 aa, Artificial Sequence
  Cyclic GFR-binding peptide
  MOD_RES (6), (7): Xaa is C or S
ASASPXXVPQDLSPISILFIVG

SEQ ID NO: 8654 - protein, 22 aa, Artificial Sequence
  Cyclic GFR-binding peptide
  MOD_RES (6), (7): Xaa is C or S
YVPKPXXAPTKLSPISVLFIDD

SEQ ID NO: 8655 - protein, 28 aa, Artificial Sequence
  Cyclic GFR-binding peptide
  MOD_RES (24), (24): Xaa is C or S
KPKKRVYEIKRVQVPRHHVRSPQXKVSS

SEQ ID NO: 8656 - protein, 13 aa, Artificial Sequence
  Cyclic GFR-binding peptide
VKAVKVSRLQVQT

SEQ ID NO: 8657 - protein, 13 aa, Artificial Sequence
  Cyclic GFR-binding peptide
IKRMQVPRQGTPV

SEQ ID NO: 8658 - protein, 23 aa, Artificial Sequence
  Cyclic GFR-binding peptide
  MOD_RES (19), (19): Xaa is C or S
VIEMIQVTINSLQVQTPRXQVNR

SEQ ID NO: 8659 - protein, 19 aa, Artificial Sequence
  Cyclic GFR-binding peptide
  MOD_RES (14), (14): Xaa is C or S
IKRMQVPRQGTPVXELGED

SEQ ID NO: 8660 - protein, 18 aa, Artificial Sequence
  Cyclic GFR-binding peptide
HQGQHPKIRIKRMQVPRE

SEQ ID NO: 8661 - protein, 25 aa, Artificial Sequence
  Cyclic GFR-binding peptide
  MOD_RES (19), (19): Xaa is C or S
HPKIRVKAMKVSRQGTPVXELGEDN

SEQ ID NO: 8662 - protein, 28 aa, Artificial Sequence
  Cyclic GFR-binding peptide
  MOD_RES (24), (24): Xaa is C or S
KPKKRVYEMIQVTINSHHVRSPQXKVSS

SEQ ID NO: 8663 - protein, 16 aa, Artificial Sequence
  Cyclic GFR-binding peptide
  MOD_RES (14), (14): Xaa is C or S
VKAMKVSRQGTPVXEL

SEQ ID NO: 8664 - protein, 29 aa, Artificial Sequence
  Cyclic GFR-binding peptide
  MOD_RES (23), (23): Xaa is C or S
HQGQHPKIRVKAMKVSREETPVXELGEDN

SEQ ID NO: 8665 - protein, 19 aa, Artificial Sequence
  Cyclic GFR-binding peptide
HQGQHPKIRIKRMQVPREE

SEQ ID NO: 8666 - protein, 22 aa, Artificial Sequence
  Cyclic GFR-binding peptide
  MOD_RES (18), (18): Xaa is C or S
YEIKRVQVPRHHVRSPQXKVSS

SEQ ID NO: 8667 - protein, 13 aa, Artificial Sequence
  Cyclic GFR-binding peptide
MIQVTINSLQVQT

SEQ ID NO: 8668 - protein, 19 aa, Artificial Sequence
  Cyclic GFR-binding peptide
  MOD_RES (14), (14): Xaa is C or S
VKAMKVSREETPVXELGED

SEQ ID NO: 8669 - protein, 17 aa, Artificial Sequence
  Cyclic GFR-binding peptide
LKPKKRVYEIKRVQVPR

SEQ ID NO: 8670 - protein, 13 aa, Artificial Sequence
  Cyclic GFR-binding peptide
VKAMKVSREETPV

SEQ ID NO: 8671 - protein, 28 aa, Artificial Sequence
  Cyclic GFR-binding peptide
  MOD_RES (22), (22): Xaa is C or S
QGQHPKIRIKRMQVPREETPVXELGEDN

SEQ ID NO: 8672 - protein, 21 aa, Artificial Sequence
  Cyclic GFR-binding peptide
LKPKKRVYEIKRVQVPRHHVR

SEQ ID NO: 8673 - protein, 16 aa, Artificial Sequence
  Cyclic GFR-binding peptide
  MOD_RES (16), (16): Xaa is C or S
MIQVTINSLQVQTPRX

SEQ ID NO: 8674 - protein, 14 aa, Artificial Sequence
  Cyclic GFR-binding peptide
MIQVTINSHHVRSP

SEQ ID NO: 8675 - protein, 20 aa, Artificial Sequence
  Cyclic GFR-binding peptide
LKPKKRVYEIKRVQVPRHHV

SEQ ID NO: 8676 - protein, 20 aa, Artificial Sequence
  Cyclic GFR-binding peptide
HQGQHPKIRVKAMKVSRQGT

SEQ ID NO: 8677 - protein, 22 aa, Artificial Sequence
  Cyclic GFR-binding peptide
  MOD_RES (18), (18): Xaa is C or S
IEMIQVTINSLQVQTPRXQVNR

SEQ ID NO: 8678 - protein, 17 aa, Artificial Sequence
  Cyclic GFR-binding peptide
HQGQHPKIRVKAMKVSR

SEQ ID NO: 8679 - protein, 15 aa, Artificial Sequence
  Cyclic GFR-binding peptide
  MOD_RES (14), (14): Xaa is C or S
VKAMKVSRQGTPVXE

SEQ ID NO: 8680 - protein, 21 aa, Artificial Sequence
  Cyclic GFR-binding peptide
HQGQHPKIRVKAMKVSRQGTP

SEQ ID NO: 8681 - protein, 28 aa, Artificial Sequence
  Cyclic GFR-binding peptide
  MOD_RES (22), (22): Xaa is C or S
QGQHPKIRVKAMKVSRQGTPVXELGEDN

SEQ ID NO: 8682 - protein, 20 aa, Artificial Sequence
  Cyclic GFR-binding peptide
  MOD_RES (16), (16): Xaa is C or S
IKRVQVPRHHVRSPQXKVSS

SEQ ID NO: 8683 - protein, 20 aa, Artificial Sequence
  Cyclic GFR-binding peptide
HQGQHPKIRIKRMQVPREET

SEQ ID NO: 8684 - protein, 15 aa, Artificial Sequence
  Cyclic GFR-binding peptide
  MOD_RES (14), (14): Xaa is C or S
VKAMKVSREETPVXE

SEQ ID NO: 8685 - protein, 28 aa, Artificial Sequence
  Cyclic GFR-binding peptide
  MOD_RES (24), (24): Xaa is C or S
IPKKRVIEVKAVKVSRLQVQTPRXQVNR

SEQ ID NO: 8686 - protein, 14 aa, Artificial Sequence
  Cyclic GFR-binding peptide
  MOD_RES (14), (14): Xaa is C or S
IKRMQVPREETPVX

SEQ ID NO: 8687 - protein, 27 aa, Artificial Sequence
  Cyclic GFR-binding peptide
  MOD_RES (23), (23): Xaa is C or S
PKKRVYEMIQVTINSHHVRSPQXKVSS

SEQ ID NO: 8688 - protein, 19 aa, Artificial Sequence
  Cyclic GFR-binding peptide
FIPKKRVIEMIQVTINSLQ

SEQ ID NO: 8689 - protein, 26 aa, Artificial Sequence
  Cyclic GFR-binding peptide
  MOD_RES (20), (20): Xaa is C or S
QHPKIRVKAMKVSREETPVXELGEDN

SEQ ID NO: 8690 - protein, 15 aa, Artificial Sequence
  Cyclic GFR-binding peptide
MIQVTINSHHVRSPQ

SEQ ID NO: 8691 - protein, 21 aa, Artificial Sequence
  Cyclic GFR-binding peptide
  MOD_RES (17), (17): Xaa is C or S
EVKAVKVSRLQVQTPRXQVNR

SEQ ID NO: 8692 - protein, 19 aa, Artificial Sequence
  Cyclic GFR-binding peptide
  MOD_RES (16), (16): Xaa is C or S
VKAVKVSRLQVQTPRXQVN

SEQ ID NO: 8693 - protein, 21 aa, Artificial Sequence
  Cyclic GFR-binding peptide
HQGQHPKIRIKRMQVPRQGTP

SEQ ID NO: 8694 - protein, 29 aa, Artificial Sequence
  Cyclic GFR-binding peptide
  MOD_RES (25), (25): Xaa is C or S
FIPKKRVIEMIQVTINSLQVQTPRXQVNR

SEQ ID NO: 8695 - protein, 16 aa, Artificial Sequence
  Cyclic GFR-binding peptide
  MOD_RES (14), (14): Xaa is C or S
IKRMQVPRQGTPVXEL

SEQ ID NO: 8696 - protein, 14 aa, Artificial Sequence
  Cyclic GFR-binding peptide
MIQVTINSLQVQTP

SEQ ID NO: 8697 - protein, 21 aa, Artificial Sequence
  Cyclic GFR-binding peptide
HQGQHPKIRVKAMKVSREETP

SEQ ID NO: 8698 - protein, 22 aa, Artificial Sequence
  Cyclic GFR-binding peptide
  MOD_RES (18), (18): Xaa is C or S
YEMIQVTINSHHVRSPQXKVSS

SEQ ID NO: 8699 - protein, 27 aa, Artificial Sequence
  Cyclic GFR-binding peptide
  MOD_RES (23), (23): Xaa is C or S
PKKRVYEIKRVQVPRHHVRSPQXKVSS

SEQ ID NO: 8700 - protein, 21 aa, Artificial Sequence
  Cyclic GFR-binding peptide
  MOD_RES (17), (17): Xaa is C or S
EMIQVTINSLQVQTPRXQVNR

SEQ ID NO: 8701 - protein, 13 aa, Artificial Sequence
  Cyclic GFR-binding peptide
VKAMKVSRQGTPV

SEQ ID NO: 8702 - protein, 21 aa, Artificial Sequence
  Cyclic GFR-binding peptide
  MOD_RES (15), (15): Xaa is C or S
RIKRMQVPRQGTPVXELGEDN

SEQ ID NO: 8703 - protein, 18 aa, Artificial Sequence
  Cyclic GFR-binding peptide
  MOD_RES (14), (14): Xaa is C or S
VKAMKVSRQGTPVXELGE

SEQ ID NO: 8704 - protein, 18 aa, Artificial Sequence
  Cyclic GFR-binding peptide
HQGQHPKIRVKAMKVSRQ

SEQ ID NO: 8705 - protein, 20 aa, Artificial Sequence
  Cyclic GFR-binding peptide
FIPKKRVIEVKAVKVSRLQV

SEQ ID NO: 8706 - protein, 23 aa, Artificial Sequence
  Cyclic GFR-binding peptide
  MOD_RES (19), (19): Xaa is C or S
VYEIKRVQVPRHHVRSPQXKVSS

SEQ ID NO: 8707 - protein, 23 aa, Artificial Sequence
  Cyclic GFR-binding peptide
  MOD_RES (19), (19): Xaa is C or S
VYEMIQVTINSHHVRSPQXKVSS

SEQ ID NO: 8708 - protein, 29 aa, Artificial Sequence
  Cyclic GFR-binding peptide
  MOD_RES (23), (23): Xaa is C or S
HQGQHPKIRIKRMQVPREETPVXELGEDN

SEQ ID NO: 8709 - protein, 29 aa, Artificial Sequence
  Cyclic GFR-binding peptide
  MOD_RES (25), (25): Xaa is C or S
FIPKKRVIEVKAVKVSRLQVQTPRXQVNR

SEQ ID NO: 8710 - protein, 25 aa, Artificial Sequence
  Cyclic GFR-binding peptide
  MOD_RES (21), (21): Xaa is C or S
KRVIEVKAVKVSRLQVQTPRXQVNR

SEQ ID NO: 8711 - protein, 22 aa, Artificial Sequence
  Cyclic GFR-binding peptide
  MOD_RES (16), (16): Xaa is C or S
IRIKRMQVPREETPVXELGEDN

SEQ ID NO: 8712 - protein, 20 aa, Artificial Sequence
  Cyclic GFR-binding peptide
  MOD_RES (14), (14): Xaa is C or S
VKAMKVSRQGTPVXELGEDN

SEQ ID NO: 8713 - protein, 17 aa, Artificial Sequence
  Cyclic GFR-binding peptide
  MOD_RES (14), (14): Xaa is C or S
VKAMKVSRQGTPVXELG

SEQ ID NO: 8714 - protein, 18 aa, Artificial Sequence
  Cyclic GFR-binding peptide
HQGQHPKIRVKAMKVSRE

SEQ ID NO: 8715 - protein, 25 aa, Artificial Sequence
  Cyclic GFR-binding peptide
  MOD_RES (21), (21): Xaa is C or S
KRVIEMIQVTINSLQVQTPRXQVNR

SEQ ID NO: 8716 - protein, 18 aa, Artificial Sequence
  Cyclic GFR-binding peptide
  MOD_RES (16), (16): Xaa is C or S
IKRVQVPRHHVRSPQXKV

SEQ ID NO: 8717 - protein, 17 aa, Artificial Sequence
  Cyclic GFR-binding peptide
  MOD_RES (16), (16): Xaa is C or S
IKRVQVPRHHVRSPQXK

SEQ ID NO: 8718 - protein, 26 aa, Artificial Sequence
  Cyclic GFR-binding peptide
  MOD_RES (20), (20): Xaa is C or S
QHPKIRIKRMQVPRQGTPVXELGEDN

SEQ ID NO: 8719 - protein, 17 aa, Artificial Sequence
  Cyclic GFR-binding peptide
  MOD_RES (14), (14): Xaa is C or S
VKAMKVSREETPVXELG

SEQ ID NO: 8720 - protein, 19 aa, Artificial Sequence
  Cyclic GFR-binding peptide
HQGQHPKIRVKAMKVSREE

SEQ ID NO: 8721 - protein, 18 aa, Artificial Sequence
  Cyclic GFR-binding peptide
  MOD_RES (14), (14): Xaa is C or S
VKAMKVSREETPVXELGE

SEQ ID NO: 8722 - protein, 16 aa, Artificial Sequence
  Cyclic GFR-binding peptide
  MOD_RES (16), (16): Xaa is C or S
IKRVQVPRHHVRSPQX

SEQ ID NO: 8723 - protein, 29 aa, Artificial Sequence
  Cyclic GFR-binding peptide
  MOD_RES (25), (25): Xaa is C or S
LKPKKRVYEMIQVTINSHHVRSPQXKVSS

SEQ ID NO: 8724 - protein, 29 aa, Artificial Sequence
  Cyclic GFR-binding peptide
  MOD_RES (25), (25): Xaa is C or S
LKPKKRVYEIKRVQVPRHHVRSPQXKVSS

SEQ ID NO: 8725 - protein, 19 aa, Artificial Sequence
  Cyclic GFR-binding peptide
FIPKKRVIEVKAVKVSRLQ

SEQ ID NO: 8726 - protein, 22 aa, Artificial Sequence
  Cyclic GFR-binding peptide
  MOD_RES (16), (16): Xaa is C or S
IRIKRMQVPRQGTPVXELGEDN

SEQ ID NO: 8727 - protein, 20 aa, Artificial Sequence
  Cyclic GFR-binding peptide
HQGQHPKIRIKRMQVPRQGT

SEQ ID NO: 8728 - protein, 18 aa, Artificial Sequence
  Cyclic GFR-binding peptide
  MOD_RES (16), (16): Xaa is C or S
MIQVTINSLQVQTPRXQV

SEQ ID NO: 8729 - protein, 19 aa, Artificial Sequence
  Cyclic GFR-binding peptide
LKPKKRVYEMIQVTINSHH

SEQ ID NO: 8730 - protein, 14 aa, Artificial Sequence
  Cyclic GFR-binding peptide
IKRVQVPRHHVRSP

SEQ ID NO: 8731 - protein, 26 aa, Artificial Sequence
  Cyclic GFR-binding peptide
  MOD_RES (20), (20): Xaa is C or S
QHPKIRIKRMQVPREETPVXELGEDN

SEQ ID NO: 8732 - protein, 21 aa, Artificial Sequence
  Cyclic GFR-binding peptide
  MOD_RES (17), (17): Xaa is C or S
EIKRVQVPRHHVRSPQXKVSS

SEQ ID NO: 8733 - protein, 17 aa, Artificial Sequence
  Cyclic GFR-binding peptide
HQGQHPKIRIKRMQVPR

SEQ ID NO: 8734 - protein, 23 aa, Artificial Sequence
  Cyclic GFR-binding peptide
  MOD_RES (17), (17): Xaa is C or S
KIRVKAMKVSREETPVXELGEDN

SEQ ID NO: 8735 - protein, 14 aa, Artificial Sequence
  Cyclic GFR-binding peptide
  MOD_RES (14), (14): Xaa is C or S
VKAMKVSREETPVX

SEQ ID NO: 8736 - protein, 27 aa, Artificial Sequence
  Cyclic GFR-binding peptide
  MOD_RES (21), (21): Xaa is C or S
GQHPKIRIKRMQVPRQGTPVXELGEDN

SEQ ID NO: 8737 - protein, 29 aa, Artificial Sequence
  Cyclic GFR-binding peptide
  MOD_RES (23), (23): Xaa is C or S
HQGQHPKIRVKAMKVSRQGTPVXELGEDN

SEQ ID NO: 8738 - protein, 15 aa, Artificial Sequence
  Cyclic GFR-binding peptide
MIQVTINSLQVQTPR

SEQ ID NO: 8739 - protein, 26 aa, Artificial Sequence
  Cyclic GFR-binding peptide
  MOD_RES (22), (22): Xaa is C or S
KKRVIEVKAVKVSRLQVQTPRXQVNR

SEQ ID NO: 8740 - protein, 15 aa, Artificial Sequence
  Cyclic GFR-binding peptide
VKAVKVSRLQVQTPR

SEQ ID NO: 8741 - protein, 20 aa, Artificial Sequence
  Cyclic GFR-binding peptide
  MOD_RES (16), (16): Xaa is C or S
MIQVTINSLQVQTPRXQVNR

SEQ ID NO: 8742 - protein, 25 aa, Artificial Sequence
  Cyclic GFR-binding peptide
  MOD_RES (19), (19): Xaa is C or S
HPKIRIKRMQVPRQGTPVXELGEDN

SEQ ID NO: 8743 - protein, 21 aa, Artificial Sequence
  Cyclic GFR-binding peptide
  MOD_RES (15), (15): Xaa is C or S
RIKRMQVPREETPVXELGEDN

SEQ ID NO: 8744 - protein, 15 aa, Artificial Sequence
  Cyclic GFR-binding peptide
IKRVQVPRHHVRSPQ

SEQ ID NO: 8745 - protein, 14 aa, Artificial Sequence
  Cyclic GFR-binding peptide
  MOD_RES (14), (14): Xaa is C or S
IKRMQVPRQGTPVX

SEQ ID NO: 8746 - protein, 19 aa, Artificial Sequence
  Cyclic GFR-binding peptide
  MOD_RES (16), (16): Xaa is C or S
IKRVQVPRHHVRSPQXKVS

SEQ ID NO: 8747 - protein, 20 aa, Artificial Sequence
  Cyclic GFR-binding peptide
  MOD_RES (16), (16): Xaa is C or S
VKAVKVSRLQVQTPRXQVNR

SEQ ID NO: 8748 - protein, 17 aa, Artificial Sequence
  Cyclic GFR-binding peptide
  MOD_RES (14), (14): Xaa is C or S
IKRMQVPREETPVXELG

SEQ ID NO: 8749 - protein, 21 aa, Artificial Sequence
  Cyclic GFR-binding peptide
LKPKKRVYEMIQVTINSHHVR

SEQ ID NO: 8750 - protein, 27 aa, Artificial Sequence
  Cyclic GFR-binding peptide
  MOD_RES (21), (21): Xaa is C or S
GQHPKIRVKAMKVSRQGTPVXELGEDN

SEQ ID NO: 8751 - protein, 20 aa, Artificial Sequence
  Cyclic GFR-binding peptide
HQGQHPKIRVKAMKVSREET

SEQ ID NO: 8752 - protein, 20 aa, Artificial Sequence
  Cyclic GFR-binding peptide
  MOD_RES (14), (14): Xaa is C or S
VKAMKVSREETPVXELGEDN

SEQ ID NO: 8753 - protein, 16 aa, Artificial Sequence
  Cyclic GFR-binding peptide
  MOD_RES (14), (14): Xaa is C or S
IKRMQVPREETPVXEL

SEQ ID NO: 8754 - protein, 17 aa, Artificial Sequence
  Cyclic GFR-binding peptide
LKPKKRVYEMIQVTINS

SEQ ID NO: 8755 - protein, 18 aa, Artificial Sequence
  Cyclic GFR-binding peptide
  MOD_RES (16), (16): Xaa is C or S
VKAVKVSRLQVQTPRXQV

SEQ ID NO: 8756 - protein, 17 aa, Artificial Sequence
  Cyclic GFR-binding peptide
  MOD_RES (16), (16): Xaa is C or S
MIQVTINSHHVRSPQXK

SEQ ID NO: 8757 - protein, 17 aa, Artificial Sequence
  Cyclic GFR-binding peptide
FIPKKRVIEVKAVKVSR

SEQ ID NO: 8758 - protein, 26 aa, Artificial Sequence
  Cyclic GFR-binding peptide
  MOD_RES (20), (20): Xaa is C or S
QHPKIRVKAMKVSRQGTPVXELGEDN

SEQ ID NO: 8759 - protein, 23 aa, Artificial Sequence
  Cyclic GFR-binding peptide
  MOD_RES (17), (17): Xaa is C or S
KIRIKRMQVPREETPVXELGEDN

SEQ ID NO: 8760 - protein, 22 aa, Artificial Sequence
  Cyclic GFR-binding peptide
  MOD_RES (16), (16): Xaa is C or S
IRVKAMKVSRQGTPVXELGEDN

SEQ ID NO: 8761 - protein, 21 aa, Artificial Sequence
  Cyclic GFR-binding peptide
HQGQHPKIRIKRMQVPREETP

SEQ ID NO: 8762 - protein, 25 aa, Artificial Sequence
  Cyclic GFR-binding peptide
  MOD_RES (19), (19): Xaa is C or S
HPKIRIKRMQVPREETPVXELGEDN

SEQ ID NO: 8763 - protein, 18 aa, Artificial Sequence
  Cyclic GFR-binding peptide
HQGQHPKIRIKRMQVPRQ

SEQ ID NO: 8764 - protein, 27 aa, Artificial Sequence
  Cyclic GFR-binding peptide
  MOD_RES (23), (23): Xaa is C or S
PKKRVIEMIQVTINSLQVQTPRXQVNR

SEQ ID NO: 8765 - protein, 23 aa, Artificial Sequence
  Cyclic GFR-binding peptide
  MOD_RES (17), (17): Xaa is C or S
KIRVKAMKVSRQGTPVXELGEDN

SEQ ID NO: 8766 - protein, 28 aa, Artificial Sequence
  Cyclic GFR-binding peptide
  MOD_RES (22), (22): Xaa is C or S
QGQHPKIRIKRMQVPRQGTPVXELGEDN

SEQ ID NO: 8767 - protein, 23 aa, Artificial Sequence
  Cyclic GFR-binding peptide
  MOD_RES (17), (17): Xaa is C or S
KIRIKRMQVPRQGTPVXELGEDN

SEQ ID NO: 8768 - protein, 19 aa, Artificial Sequence
  Cyclic GFR-binding peptide
  MOD_RES (14), (14): Xaa is C or S
VKAMKVSRQGTPVXELGED

SEQ ID NO: 8769 - protein, 13 aa, Artificial Sequence
  Cyclic GFR-binding peptide
MIQVTINSHHVRS

SEQ ID NO: 8770 - protein, 21 aa, Artificial Sequence
  Cyclic GFR-binding peptide
  MOD_RES (15), (15): Xaa is C or S
RVKAMKVSRQGTPVXELGEDN

SEQ ID NO: 8771 - protein, 19 aa, Artificial Sequence
  Cyclic GFR-binding peptide
HQGQHPKIRIKRMQVPRQG

SEQ ID NO: 8772 - protein, 20 aa, Artificial Sequence
  Cyclic GFR-binding peptide
  MOD_RES (16), (16): Xaa is C or S
MIQVTINSHHVRSPQXKVSS

SEQ ID NO: 8773 - protein, 21 aa, Artificial Sequence
  Cyclic GFR-binding peptide
FIPKKRVIEVKAVKVSRLQVQ

SEQ ID NO: 8774 - protein, 20 aa, Artificial Sequence
  Cyclic GFR-binding peptide
LKPKKRVYEMIQVTINSHHV

SEQ ID NO: 8775 - protein, 18 aa, Artificial Sequence
  Cyclic GFR-binding peptide
FIPKKRVIEMIQVTINSL

SEQ ID NO: 8776 - protein, 14 aa, Artificial Sequence
  Cyclic GFR-binding peptide
  MOD_RES (14), (14): Xaa is C or S
VKAMKVSRQGTPVX

SEQ ID NO: 8777 - protein, 19 aa, Artificial Sequence
  Cyclic GFR-binding peptide
  MOD_RES (14), (14): Xaa is C or S
IKRMQVPREETPVXELGED

SEQ ID NO: 8778 - protein, 21 aa, Artificial Sequence
  Cyclic GFR-binding peptide
  MOD_RES (17), (17): Xaa is C or S
EMIQVTINSHHVRSPQXKVSS

SEQ ID NO: 8779 - protein, 13 aa, Artificial Sequence
  Cyclic GFR-binding peptide
IKRMQVPREETPV

SEQ ID NO: 8780 - protein, 18 aa, Artificial Sequence
  Cyclic GFR-binding peptide
  MOD_RES (16), (16): Xaa is C or S
MIQVTINSHHVRSPQXKV

SEQ ID NO: 8781 - protein, 27 aa, Artificial Sequence
  Cyclic GFR-binding peptide
  MOD_RES (21), (21): Xaa is C or S
GQHPKIRVKAMKVSREETPVXELGEDN

SEQ ID NO: 8782 - protein, 22 aa, Artificial Sequence
  Cyclic GFR-binding peptide
  MOD_RES (16), (16): Xaa is C or S
IRVKAMKVSREETPVXELGEDN

SEQ ID NO: 8783 - protein, 28 aa, Artificial Sequence
  Cyclic GFR-binding peptide
  MOD_RES (24), (24): Xaa is C or S
IPKKRVIEMIQVTINSLQVQTPRXQVNR

SEQ ID NO: 8784 - protein, 16 aa, Artificial Sequence
  Cyclic GFR-binding peptide
  MOD_RES (16), (16): Xaa is C or S
VKAVKVSRLQVQTPRX

SEQ ID NO: 8785 - protein, 14 aa, Artificial Sequence
  Cyclic GFR-binding peptide
VKAVKVSRLQVQTP

SEQ ID NO: 8786 - protein, 13 aa, Artificial Sequence
  Cyclic GFR-binding peptide
IKRVQVPRHHVRS

SEQ ID NO: 8787 - protein, 27 aa, Artificial Sequence
  Cyclic GFR-binding peptide
  MOD_RES (21), (21): Xaa is C or S
GQHPKIRIKRMQVPREETPVXELGEDN

SEQ ID NO: 8788 - protein, 21 aa, Artificial Sequence
  Cyclic GFR-binding peptide
  MOD_RES (15), (15): Xaa is C or S
RVKAMKVSREETPVXELGEDN

SEQ ID NO: 8789 - protein, 23 aa, Artificial Sequence
  Cyclic GFR-binding peptide
  MOD_RES (19), (19): Xaa is C or S
VIEVKAVKVSRLQVQTPRXQVNR

SEQ ID NO: 8790 - protein, 25 aa, Artificial Sequence
  Cyclic GFR-binding peptide
  MOD_RES (21), (21): Xaa is C or S
KRVYEIKRVQVPRHHVRSPQXKVSS

SEQ ID NO: 8791 - protein, 22 aa, Artificial Sequence
  Cyclic GFR-binding peptide
  MOD_RES (18), (18): Xaa is C or S
IEVKAVKVSRLQVQTPRXQVNR

SEQ ID NO: 8792 - protein, 26 aa, Artificial Sequence
  Cyclic GFR-binding peptide
  MOD_RES (22), (22): Xaa is C or S
KKRVYEMIQVTINSHHVRSPQXKVSS

SEQ ID NO: 8793 - protein, 17 aa, Artificial Sequence
  Cyclic GFR-binding peptide
  MOD_RES (16), (16): Xaa is C or S
MIQVTINSLQVQTPRXQ

SEQ ID NO: 8794 - protein, 25 aa, Artificial Sequence
  Cyclic GFR-binding peptide
  MOD_RES (21), (21): Xaa is C or S
KRVYEMIQVTINSHHVRSPQXKVSS

SEQ ID NO: 8795 - protein, 18 aa, Artificial Sequence
  Cyclic GFR-binding peptide
  MOD_RES (14), (14): Xaa is C or S
IKRMQVPREETPVXELGE

SEQ ID NO: 8796 - protein, 20 aa, Artificial Sequence
  Cyclic GFR-binding peptide
FIPKKRVIEMIQVTINSLQV

SEQ ID NO: 8797 - protein, 18 aa, Artificial Sequence
  Cyclic GFR-binding peptide
  MOD_RES (14), (14): Xaa is C or S
IKRMQVPRQGTPVXELGE

SEQ ID NO: 8798 - protein, 20 aa, Artificial Sequence
  Cyclic GFR-binding peptide
  MOD_RES (14), (14): Xaa is C or S
IKRMQVPRQGTPVXELGEDN

SEQ ID NO: 8799 - protein, 17 aa, Artificial Sequence
  Cyclic GFR-binding peptide
  MOD_RES (16), (16): Xaa is C or S
VKAVKVSRLQVQTPRXQ

SEQ ID NO: 8800 - protein, 29 aa, Artificial Sequence
  Cyclic GFR-binding peptide
  MOD_RES (23), (23): Xaa is C or S
HQGQHPKIRIKRMQVPRQGTPVXELGEDN

SEQ ID NO: 8801 - protein, 25 aa, Artificial Sequence
  Cyclic GFR-binding peptide
  MOD_RES (19), (19): Xaa is C or S
HPKIRVKAMKVSREETPVXELGEDN

SEQ ID NO: 8802 - protein, 15 aa, Artificial Sequence
  Cyclic GFR-binding peptide
  MOD_RES (14), (14): Xaa is C or S
IKRMQVPRQGTPVXE

SEQ ID NO: 8803 - protein, 26 aa, Artificial Sequence
  Cyclic GFR-binding peptide
  MOD_RES (22), (22): Xaa is C or S
KKRVYEIKRVQVPRHHVRSPQXKVSS

SEQ ID NO: 8804 - protein, 20 aa, Artificial Sequence
  Cyclic GFR-binding peptide
  MOD_RES (14), (14): Xaa is C or S
IKRMQVPREETPVXELGEDN

SEQ ID NO: 8805 - protein, 19 aa, Artificial Sequence
  Cyclic GFR-binding peptide
LKPKKRVYEIKRVQVPRHH

SEQ ID NO: 8806 - protein, 17 aa, Artificial Sequence
  Cyclic GFR-binding peptide
  MOD_RES (14), (14): Xaa is C or S
IKRMQVPRQGTPVXELG

SEQ ID NO: 8807 - protein, 19 aa, Artificial Sequence
  Cyclic GFR-binding peptide
  MOD_RES (16), (16): Xaa is C or S
MIQVTINSHHVRSPQXKVS

SEQ ID NO: 8808 - protein, 16 aa, Artificial Sequence
  Cyclic GFR-binding peptide
  MOD_RES (14), (14): Xaa is C or S
VKAMKVSREETPVXEL

SEQ ID NO: 8809 - protein, 27 aa, Artificial Sequence
  Cyclic GFR-binding peptide
  MOD_RES (23), (23): Xaa is C or S
PKKRVIEVKAVKVSRLQVQTPRXQVNR

SEQ ID NO: 8810 - protein, 19 aa, Artificial Sequence
  Cyclic GFR-binding peptide
HQGQHPKIRVKAMKVSRQG

SEQ ID NO: 8811 - protein, 19 aa, Artificial Sequence
  Cyclic GFR-binding peptide
  MOD_RES (16), (16): Xaa is C or S
MIQVTINSLQVQTPRXQVN

SEQ ID NO: 8812 - protein, 16 aa, Artificial Sequence
  Cyclic GFR-binding peptide
  MOD_RES (16), (16): Xaa is C or S
MIQVTINSHHVRSPQX

SEQ ID NO: 8813 - protein, 26 aa, Artificial Sequence
  Cyclic GFR-binding peptide
  MOD_RES (22), (22): Xaa is C or S
KKRVIEMIQVTINSLQVQTPRXQVNR

SEQ ID NO: 8814 - protein, 18 aa, Artificial Sequence
  Cyclic GFR-binding peptide
LKPKKRVYEIKRVQVPRH

SEQ ID NO: 8815 - protein, 15 aa, Artificial Sequence
  Cyclic GFR-binding peptide
  MOD_RES (14), (14): Xaa is C or S
IKRMQVPREETPVXE

SEQ ID NO: 8816 - protein, 21 aa, Artificial Sequence
  Cyclic GFR-binding peptide
FIPKKRVIEMIQVTINSLQVQ

SEQ ID NO: 8817 - protein, 18 aa, Artificial Sequence
  Cyclic GFR-binding peptide
FIPKKRVIEVKAVKVSRL

SEQ ID NO: 8818 - protein, 18 aa, Artificial Sequence
  Cyclic GFR-binding peptide
LKPKKRVYEMIQVTINSH

SEQ ID NO: 8819 - protein, 17 aa, Artificial Sequence
  Cyclic GFR-binding peptide
FIPKKRVIEMIQVTINS

SEQ ID NO: 8820 - protein, 28 aa, Artificial Sequence
  Cyclic GFR-binding peptide
  MOD_RES (22), (22): Xaa is C or S
QGQHPKIRVKAMKVSREETPVXELGEDN

SEQ ID NO: 8821 - protein, 28 aa, Artificial Sequence
  Cyclic GFR-binding peptide
  MOD_RES (5), (5): Xaa is C or S
SSVKXQPSRVHHRPVQVRKIEYVRKKPK

SEQ ID NO: 8822 - protein, 13 aa, Artificial Sequence
  Cyclic GFR-binding peptide
TQVQLRSVKVAKV

SEQ ID NO: 8823 - protein, 13 aa, Artificial Sequence
  Cyclic GFR-binding peptide
VPTGQRPVQMRKI

SEQ ID NO: 8824 - protein, 23 aa, Artificial Sequence
  Cyclic GFR-binding peptide
  MOD_RES (5), (5): Xaa is C or S
RNVQXRPTQVQLSNITVQIMEIV

SEQ ID NO: 8825 - protein, 19 aa, Artificial Sequence
  Cyclic GFR-binding peptide
  MOD_RES (6), (6): Xaa is C or S
DEGLEXVPTGQRPVQMRKI

SEQ ID NO: 8826 - protein, 18 aa, Artificial Sequence
  Cyclic GFR-binding peptide
ERPVQMRKIRIKPHQGQH

SEQ ID NO: 8827 - protein, 25 aa, Artificial Sequence
  Cyclic GFR-binding peptide
  MOD_RES (7), (7): Xaa is C or S
NDEGLEXVPTGQRSVKMAKVRIKPH

SEQ ID NO: 8828 - protein, 28 aa, Artificial Sequence
  Cyclic GFR-binding peptide
  MOD_RES (5), (5): Xaa is C or S
SSVKXQPSRVHHSNITVQIMEYVRKKPK

SEQ ID NO: 8829 - protein, 16 aa, Artificial Sequence
  Cyclic GFR-binding peptide
  MOD_RES (3), (3): Xaa is C or S
LEXVPTGQRSVKMAKV

SEQ ID NO: 8830 - protein, 29 aa, Artificial Sequence
  Cyclic GFR-binding peptide
  MOD_RES (7), (7): Xaa is C or S
NDEGLEXVPTEERSVKMAKVRIKPHQGQH

SEQ ID NO: 8831 - protein, 19 aa, Artificial Sequence
  Cyclic GFR-binding peptide
EERPVQMRKIRIKPHQGQH

SEQ ID NO: 8832 - protein, 22 aa, Artificial Sequence
  Cyclic GFR-binding peptide
  MOD_RES (5), (5): Xaa is C or S
SSVKXQPSRVHHRPVQVRKIEY

SEQ ID NO: 8833 - protein, 13 aa, Artificial Sequence
  Cyclic GFR-binding peptide
TQVQLSNITVQIM

SEQ ID NO: 8834 - protein, 19 aa, Artificial Sequence
  Cyclic GFR-binding peptide
  MOD_RES (6), (6): Xaa is C or S
DEGLEXVPTEERSVKMAKV

SEQ ID NO: 8835 - protein, 17 aa, Artificial Sequence
  Cyclic GFR-binding peptide
RPVQVRKIEYVRKKPKL

SEQ ID NO: 8836 - protein, 13 aa, Artificial Sequence
  Cyclic GFR-binding peptide
VPTEERSVKMAKV

SEQ ID NO: 8837 - protein, 28 aa, Artificial Sequence
  Cyclic GFR-binding peptide
  MOD_RES (7), (7): Xaa is C or S
NDEGLEXVPTEERPVQMRKIRIKPHQGQ

SEQ ID NO: 8838 - protein, 21 aa, Artificial Sequence
  Cyclic GFR-binding peptide
RVHHRPVQVRKIEYVRKKPKL

SEQ ID NO: 8839 - protein, 16 aa, Artificial Sequence
  Cyclic GFR-binding peptide
  MOD_RES (1), (1): Xaa is C or S
XRPTQVQLSNITVQIM

SEQ ID NO: 8840 - protein, 14 aa, Artificial Sequence
  Cyclic GFR-binding peptide
PSRVHHSNITVQIM

SEQ ID NO: 8841 - protein, 20 aa, Artificial Sequence
  Cyclic GFR-binding peptide
VHHRPVQVRKIEYVRKKPKL

SEQ ID NO: 8842 - protein, 20 aa, Artificial Sequence
  Cyclic GFR-binding peptide
TGQRSVKMAKVRIKPHQGQH

SEQ ID NO: 8843 - protein, 22 aa, Artificial Sequence
  Cyclic GFR-binding peptide
  MOD_RES (5), (5): Xaa is C or S
RNVQXRPTQVQLSNITVQIMEI

SEQ ID NO: 8844 - protein, 17 aa, Artificial Sequence
  Cyclic GFR-binding peptide
RSVKMAKVRIKPHQGQH

SEQ ID NO: 8845 - protein, 15 aa, Artificial Sequence
  Cyclic GFR-binding peptide
  MOD_RES (2), (2): Xaa is C or S
EXVPTGQRSVKMAKV

SEQ ID NO: 8846 - protein, 21 aa, Artificial Sequence
  Cyclic GFR-binding peptide
PTGQRSVKMAKVRIKPHQGQH

SEQ ID NO: 8847 - protein, 28 aa, Artificial Sequence
  Cyclic GFR-binding peptide
  MOD_RES (7), (7): Xaa is C or S
NDEGLEXVPTGQRSVKMAKVRIKPHQGQ

SEQ ID NO: 8848 - protein, 20 aa, Artificial Sequence
  Cyclic GFR-binding peptide
  MOD_RES (5), (5): Xaa is C or S
SSVKXQPSRVHHRPVQVRKI

SEQ ID NO: 8849 - protein, 20 aa, Artificial Sequence
  Cyclic GFR-binding peptide
TEERPVQMRKIRIKPHQGQH

SEQ ID NO: 8850 - protein, 15 aa, Artificial Sequence
  Cyclic GFR-binding peptide
  MOD_RES (2), (2): Xaa is C or S
EXVPTEERSVKMAKV

SEQ ID NO: 8851 - protein, 28 aa, Artificial Sequence
  Cyclic GFR-binding peptide
  MOD_RES (5), (5): Xaa is C or S
RNVQXRPTQVQLRSVKVAKVEIVRKKPI

SEQ ID NO: 8852 - protein, 14 aa, Artificial Sequence
  Cyclic GFR-binding peptide
  MOD_RES (1), (1): Xaa is C or S
XVPTEERPVQMRKI

SEQ ID NO: 8853 - protein, 27 aa, Artificial Sequence
  Cyclic GFR-binding peptide
  MOD_RES (5), (5): Xaa is C or S
SSVKXQPSRVHHSNITVQIMEYVRKKP

SEQ ID NO: 8854 - protein, 19 aa, Artificial Sequence
  Cyclic GFR-binding peptide
QLSNITVQIMEIVRKKPIF

SEQ ID NO: 8855 - protein, 26 aa, Artificial Sequence
  Cyclic GFR-binding peptide
  MOD_RES (7), (7): Xaa is C or S
NDEGLEXVPTEERSVKMAKVRIKPHQ

SEQ ID NO: 8856 - protein, 15 aa, Artificial Sequence
  Cyclic GFR-binding peptide
QPSRVHHSNITVQIM

SEQ ID NO: 8857 - protein, 21 aa, Artificial Sequence
  Cyclic GFR-binding peptide
  MOD_RES (5), (5): Xaa is C or S
RNVQXRPTQVQLRSVKVAKVE

SEQ ID NO: 8858 - protein, 19 aa, Artificial Sequence
  Cyclic GFR-binding peptide
  MOD_RES (4), (4): Xaa is C or S
NVQXRPTQVQLRSVKVAKV

SEQ ID NO: 8859 - protein, 21 aa, Artificial Sequence
  Cyclic GFR-binding peptide
PTGQRPVQMRKIRIKPHQGQH

SEQ ID NO: 8860 - protein, 29 aa, Artificial Sequence
  Cyclic GFR-binding peptide
  MOD_RES (5), (5): Xaa is C or S
RNVQXRPTQVQLSNITVQIMEIVRKKPIF

SEQ ID NO: 8861 - protein, 16 aa, Artificial Sequence
  Cyclic GFR-binding peptide
  MOD_RES (3), (3): Xaa is C or S
LEXVPTGQRPVQMRKI

SEQ ID NO: 8862 - protein, 14 aa, Artificial Sequence
  Cyclic GFR-binding peptide
PTQVQLSNITVQIM

SEQ ID NO: 8863 - protein, 21 aa, Artificial Sequence
  Cyclic GFR-binding peptide
PTEERSVKMAKVRIKPHQGQH

SEQ ID NO: 8864 - protein, 22 aa, Artificial Sequence
  Cyclic GFR-binding peptide
  MOD_RES (5), (5): Xaa is C or S
SSVKXQPSRVHHSNITVQIMEY

SEQ ID NO: 8865 - protein, 27 aa, Artificial Sequence
  Cyclic GFR-binding peptide
  MOD_RES (5), (5): Xaa is C or S
SSVKXQPSRVHHRPVQVRKIEYVRKKP

SEQ ID NO: 8866 - protein, 21 aa, Artificial Sequence
  Cyclic GFR-binding peptide
  MOD_RES (5), (5): Xaa is C or S
RNVQXRPTQVQLSNITVQIME

SEQ ID NO: 8867 - protein, 13 aa, Artificial Sequence
  Cyclic GFR-binding peptide
VPTGQRSVKMAKV

SEQ ID NO: 8868 - protein, 21 aa, Artificial Sequence
  Cyclic GFR-binding peptide
  MOD_RES (7), (7): Xaa is C or S
NDEGLEXVPTGQRPVQMRKIR

SEQ ID NO: 8869 - protein, 18 aa, Artificial Sequence
  Cyclic GFR-binding peptide
  MOD_RES (5), (5): Xaa is C or S
EGLEXVPTGQRSVKMAKV

SEQ ID NO: 8870 - protein, 18 aa, Artificial Sequence
  Cyclic GFR-binding peptide
QRSVKMAKVRIKPHQGQH

SEQ ID NO: 8871 - protein, 20 aa, Artificial Sequence
  Cyclic GFR-binding peptide
VQLRSVKVAKVEIVRKKPIF

SEQ ID NO: 8872 - protein, 23 aa, Artificial Sequence
  Cyclic GFR-binding peptide
  MOD_RES (5), (5): Xaa is C or S
SSVKXQPSRVHHRPVQVRKIEYV

SEQ ID NO: 8873 - protein, 23 aa, Artificial Sequence
  Cyclic GFR-binding peptide
  MOD_RES (5), (5): Xaa is C or S
SSVKXQPSRVHHSNITVQIMEYV

SEQ ID NO: 8874 - protein, 29 aa, Artificial Sequence
  Cyclic GFR-binding peptide
  MOD_RES (7), (7): Xaa is C or S
NDEGLEXVPTEERPVQMRKIRIKPHQGQH

SEQ ID NO: 8875 - protein, 29 aa, Artificial Sequence
  Cyclic GFR-binding peptide
  MOD_RES (5), (5): Xaa is C or S
RNVQXRPTQVQLRSVKVAKVEIVRKKPIF

SEQ ID NO: 8876 - protein, 25 aa, Artificial Sequence
  Cyclic GFR-binding peptide
  MOD_RES (5), (5): Xaa is C or S
RNVQXRPTQVQLRSVKVAKVEIVRK

SEQ ID NO: 8877 - protein, 22 aa, Artificial Sequence
  Cyclic GFR-binding peptide
  MOD_RES (7), (7): Xaa is C or S
NDEGLEXVPTEERPVQMRKIRI

SEQ ID NO: 8878 - protein, 20 aa, Artificial Sequence
  Cyclic GFR-binding peptide
  MOD_RES (7), (7): Xaa is C or S
NDEGLEXVPTGQRSVKMAKV

SEQ ID NO: 8879 - protein, 17 aa, Artificial Sequence
  Cyclic GFR-binding peptide
  MOD_RES (4), (4): Xaa is C or S
GLEXVPTGQRSVKMAKV

SEQ ID NO: 8880 - protein, 18 aa, Artificial Sequence
  Cyclic GFR-binding peptide
ERSVKMAKVRIKPHQGQH

SEQ ID NO: 8881 - protein, 25 aa, Artificial Sequence
  Cyclic GFR-binding peptide
  MOD_RES (5), (5): Xaa is C or S
RNVQXRPTQVQLSNITVQIMEIVRK

SEQ ID NO: 8882 - protein, 18 aa, Artificial Sequence
  Cyclic GFR-binding peptide
  MOD_RES (3), (3): Xaa is C or S
VKXQPSRVHHRPVQVRKI

SEQ ID NO: 8883 - protein, 17 aa, Artificial Sequence
  Cyclic GFR-binding peptide
  MOD_RES (2), (2): Xaa is C or S
KXQPSRVHHRPVQVRKI

SEQ ID NO: 8884 - protein, 26 aa, Artificial Sequence
  Cyclic GFR-binding peptide
  MOD_RES (7), (7): Xaa is C or S
NDEGLEXVPTGQRPVQMRKIRIKPHQ

SEQ ID NO: 8885 - protein, 17 aa, Artificial Sequence
  Cyclic GFR-binding peptide
  MOD_RES (4), (4): Xaa is C or S
GLEXVPTEERSVKMAKV

SEQ ID NO: 8886 - protein, 19 aa, Artificial Sequence
  Cyclic GFR-binding peptide
EERSVKMAKVRIKPHQGQH

SEQ ID NO: 8887 - protein, 18 aa, Artificial Sequence
  Cyclic GFR-binding peptide
  MOD_RES (5), (5): Xaa is C or S
EGLEXVPTEERSVKMAKV

SEQ ID NO: 8888 - protein, 16 aa, Artificial Sequence
  Cyclic GFR-binding peptide
  MOD_RES (1), (1): Xaa is C or S
XQPSRVHHRPVQVRKI

SEQ ID NO: 8889 - protein, 29 aa, Artificial Sequence
  Cyclic GFR-binding peptide
  MOD_RES (5), (5): Xaa is C or S
SSVKXQPSRVHHSNITVQIMEYVRKKPKL

SEQ ID NO: 8890 - protein, 29 aa, Artificial Sequence
  Cyclic GFR-binding peptide
  MOD_RES (5), (5): Xaa is C or S
SSVKXQPSRVHHRPVQVRKIEYVRKKPKL

SEQ ID NO: 8891 - protein, 19 aa, Artificial Sequence
  Cyclic GFR-binding peptide
QLRSVKVAKVEIVRKKPIF

SEQ ID NO: 8892 - protein, 22 aa, Artificial Sequence
  Cyclic GFR-binding peptide
  MOD_RES (7), (7): Xaa is C or S
NDEGLEXVPTGQRPVQMRKIRI

SEQ ID NO: 8893 - protein, 20 aa, Artificial Sequence
  Cyclic GFR-binding peptide
TGQRPVQMRKIRIKPHQGQH

SEQ ID NO: 8894 - protein, 18 aa, Artificial Sequence
  Cyclic GFR-binding peptide
  MOD_RES (3), (3): Xaa is C or S
VQXRPTQVQLSNITVQIM

SEQ ID NO: 8895 - protein, 19 aa, Artificial Sequence
  Cyclic GFR-binding peptide
HHSNITVQIMEYVRKKPKL

SEQ ID NO: 8896 - protein, 14 aa, Artificial Sequence
  Cyclic GFR-binding peptide
PSRVHHRPVQVRKI

SEQ ID NO: 8897 - protein, 26 aa, Artificial Sequence
  Cyclic GFR-binding peptide
  MOD_RES (7), (7): Xaa is C or S
NDEGLEXVPTEERPVQMRKIRIKPHQ

SEQ ID NO: 8898 - protein, 21 aa, Artificial Sequence
  Cyclic GFR-binding peptide
  MOD_RES (5), (5): Xaa is C or S
SSVKXQPSRVHHRPVQVRKIE

SEQ ID NO: 8899 - protein, 17 aa, Artificial Sequence
  Cyclic GFR-binding peptide
RPVQMRKIRIKPHQGQH

SEQ ID NO: 8900 - protein, 23 aa, Artificial Sequence
  Cyclic GFR-binding peptide
  MOD_RES (7), (7): Xaa is C or S
NDEGLEXVPTEERSVKMAKVRIK

SEQ ID NO: 8901 - protein, 14 aa, Artificial Sequence
  Cyclic GFR-binding peptide
  MOD_RES (1), (1): Xaa is C or S
XVPTEERSVKMAKV

SEQ ID NO: 8902 - protein, 27 aa, Artificial Sequence
  Cyclic GFR-binding peptide
  MOD_RES (7), (7): Xaa is C or S
NDEGLEXVPTGQRPVQMRKIRIKPHQG

SEQ ID NO: 8903 - protein, 29 aa, Artificial Sequence
  Cyclic GFR-binding peptide
  MOD_RES (7), (7): Xaa is C or S
NDEGLEXVPTGQRSVKMAKVRIKPHQGQH

SEQ ID NO: 8904 - protein, 15 aa, Artificial Sequence
  Cyclic GFR-binding peptide
RPTQVQLSNITVQIM

SEQ ID NO: 8905 - protein, 26 aa, Artificial Sequence
  Cyclic GFR-binding peptide
  MOD_RES (5), (5): Xaa is C or S
RNVQXRPTQVQLRSVKVAKVEIVRKK

SEQ ID NO: 8906 - protein, 15 aa, Artificial Sequence
  Cyclic GFR-binding peptide
RPTQVQLRSVKVAKV

SEQ ID NO: 8907 - protein, 20 aa, Artificial Sequence
  Cyclic GFR-binding peptide
  MOD_RES (5), (5): Xaa is C or S
RNVQXRPTQVQLSNITVQIM

SEQ ID NO: 8908 - protein, 25 aa, Artificial Sequence
  Cyclic GFR-binding peptide
  MOD_RES (7), (7): Xaa is C or S
NDEGLEXVPTGQRPVQMRKIRIKPH

SEQ ID NO: 8909 - protein, 21 aa, Artificial Sequence
  Cyclic GFR-binding peptide
  MOD_RES (7), (7): Xaa is C or S
NDEGLEXVPTEERPVQMRKIR

SEQ ID NO: 8910 - protein, 15 aa, Artificial Sequence
  Cyclic GFR-binding peptide
QPSRVHHRPVQVRKI

SEQ ID NO: 8911 - protein, 14 aa, Artificial Sequence
  Cyclic GFR-binding peptide
  MOD_RES (1), (1): Xaa is C or S
XVPTGQRPVQMRKI

SEQ ID NO: 8912 - protein, 19 aa, Artificial Sequence
  Cyclic GFR-binding peptide
  MOD_RES (4), (4): Xaa is C or S
SVKXQPSRVHHRPVQVRKI

SEQ ID NO: 8913 - protein, 20 aa, Artificial Sequence
  Cyclic GFR-binding peptide
  MOD_RES (5), (5): Xaa is C or S
RNVQXRPTQVQLRSVKVAKV

SEQ ID NO: 8914 - protein, 17 aa, Artificial Sequence
  Cyclic GFR-binding peptide
  MOD_RES (4), (4): Xaa is C or S
GLEXVPTEERPVQMRKI

SEQ ID NO: 8915 - protein, 21 aa, Artificial Sequence
  Cyclic GFR-binding peptide
RVHHSNITVQIMEYVRKKPKL

SEQ ID NO: 8916 - protein, 27 aa, Artificial Sequence
  Cyclic GFR-binding peptide
  MOD_RES (7), (7): Xaa is C or S
NDEGLEXVPTGQRSVKMAKVRIKPHQG

SEQ ID NO: 8917 - protein, 20 aa, Artificial Sequence
  Cyclic GFR-binding peptide
TEERSVKMAKVRIKPHQGQH

SEQ ID NO: 8918 - protein, 20 aa, Artificial Sequence
  Cyclic GFR-binding peptide
  MOD_RES (7), (7): Xaa is C or S
NDEGLEXVPTEERSVKMAKV

SEQ ID NO: 8919 - protein, 16 aa, Artificial Sequence
  Cyclic GFR-binding peptide
  MOD_RES (3), (3): Xaa is C or S
LEXVPTEERPVQMRKI

SEQ ID NO: 8920 - protein, 17 aa, Artificial Sequence
  Cyclic GFR-binding peptide
SNITVQIMEYVRKKPKL

SEQ ID NO: 8921 - protein, 18 aa, Artificial Sequence
  Cyclic GFR-binding peptide
  MOD_RES (3), (3): Xaa is C or S
VQXRPTQVQLRSVKVAKV

SEQ ID NO: 8922 - protein, 17 aa, Artificial Sequence
  Cyclic GFR-binding peptide
  MOD_RES (2), (2): Xaa is C or S
KXQPSRVHHSNITVQIM

SEQ ID NO: 8923 - protein, 17 aa, Artificial Sequence
  Cyclic GFR-binding peptide
RSVKVAKVEIVRKKPIF

SEQ ID NO: 8924 - protein, 26 aa, Artificial Sequence
  Cyclic GFR-binding peptide
  MOD_RES (7), (7): Xaa is C or S
NDEGLEXVPTGQRSVKMAKVRIKPHQ

SEQ ID NO: 8925 - protein, 23 aa, Artificial Sequence
  Cyclic GFR-binding peptide
  MOD_RES (7), (7): Xaa is C or S
NDEGLEXVPTEERPVQMRKIRIK

SEQ ID NO: 8926 - protein, 22 aa, Artificial Sequence
  Cyclic GFR-binding peptide
  MOD_RES (7), (7): Xaa is C or S
NDEGLEXVPTGQRSVKMAKVRI

SEQ ID NO: 8927 - protein, 21 aa, Artificial Sequence
  Cyclic GFR-binding peptide
PTEERPVQMRKIRIKPHQGQH

SEQ ID NO: 8928 - protein, 25 aa, Artificial Sequence
  Cyclic GFR-binding peptide
  MOD_RES (7), (7): Xaa is C or S
NDEGLEXVPTEERPVQMRKIRIKPH

SEQ ID NO: 8929 - protein, 18 aa, Artificial Sequence
  Cyclic GFR-binding peptide
QRPVQMRKIRIKPHQGQH

SEQ ID NO: 8930 - protein, 27 aa, Artificial Sequence
  Cyclic GFR-binding peptide
  MOD_RES (5), (5): Xaa is C or S
RNVQXRPTQVQLSNITVQIMEIVRKKP

SEQ ID NO: 8931 - protein, 23 aa, Artificial Sequence
  Cyclic GFR-binding peptide
  MOD_RES (7), (7): Xaa is C or S
NDEGLEXVPTGQRSVKMAKVRIK

SEQ ID NO: 8932 - protein, 28 aa, Artificial Sequence
  Cyclic GFR-binding peptide
  MOD_RES (7), (7): Xaa is C or S
NDEGLEXVPTGQRPVQMRKIRIKPHQGQ

SEQ ID NO: 8933 - protein, 23 aa, Artificial Sequence
  Cyclic GFR-binding peptide
  MOD_RES (7), (7): Xaa is C or S
NDEGLEXVPTGQRPVQMRKIRIK

SEQ ID NO: 8934 - protein, 19 aa, Artificial Sequence
  Cyclic GFR-binding peptide
  MOD_RES (6), (6): Xaa is C or S
DEGLEXVPTGQRSVKMAKV

SEQ ID NO: 8935 - protein, 13 aa, Artificial Sequence
  Cyclic GFR-binding peptide
SRVHHSNITVQIM

SEQ ID NO: 8936 - protein, 21 aa, Artificial Sequence
  Cyclic GFR-binding peptide
  MOD_RES (7), (7): Xaa is C or S
NDEGLEXVPTGQRSVKMAKVR

SEQ ID NO: 8937 - protein, 19 aa, Artificial Sequence
  Cyclic GFR-binding peptide
GQRPVQMRKIRIKPHQGQH

SEQ ID NO: 8938 - protein, 20 aa, Artificial Sequence
  Cyclic GFR-binding peptide
  MOD_RES (5), (5): Xaa is C or S
SSVKXQPSRVHHSNITVQIM

SEQ ID NO: 8939 - protein, 21 aa, Artificial Sequence
  Cyclic GFR-binding peptide
QVQLRSVKVAKVEIVRKKPIF

SEQ ID NO: 8940 - protein, 20 aa, Artificial Sequence
  Cyclic GFR-binding peptide
VHHSNITVQIMEYVRKKPKL

SEQ ID NO: 8941 - protein, 18 aa, Artificial Sequence
  Cyclic GFR-binding peptide
LSNITVQIMEIVRKKPIF

SEQ ID NO: 8942 - protein, 14 aa, Artificial Sequence
  Cyclic GFR-binding peptide
  MOD_RES (1), (1): Xaa is C or S
XVPTGQRSVKMAKV

SEQ ID NO: 8943 - protein, 19 aa, Artificial Sequence
  Cyclic GFR-binding peptide
  MOD_RES (6), (6): Xaa is C or S
DEGLEXVPTEERPVQMRKI

SEQ ID NO: 8944 - protein, 21 aa, Artificial Sequence
  Cyclic GFR-binding peptide
  MOD_RES (5), (5): Xaa is C or S
SSVKXQPSRVHHSNITVQIME

SEQ ID NO: 8945 - protein, 13 aa, Artificial Sequence
  Cyclic GFR-binding peptide
VPTEERPVQMRKI

SEQ ID NO: 8946 - protein, 18 aa, Artificial Sequence
  Cyclic GFR-binding peptide
  MOD_RES (3), (3): Xaa is C or S
VKXQPSRVHHSNITVQIM

SEQ ID NO: 8947 - protein, 27 aa, Artificial Sequence
  Cyclic GFR-binding peptide
  MOD_RES (7), (7): Xaa is C or S
NDEGLEXVPTEERSVKMAKVRIKPHQG

SEQ ID NO: 8948 - protein, 22 aa, Artificial Sequence
  Cyclic GFR-binding peptide
  MOD_RES (7), (7): Xaa is C or S
NDEGLEXVPTEERSVKMAKVRI

SEQ ID NO: 8949 - protein, 28 aa, Artificial Sequence
  Cyclic GFR-binding peptide
  MOD_RES (5), (5): Xaa is C or S
RNVQXRPTQVQLSNITVQIMEIVRKKPI

SEQ ID NO: 8950 - protein, 16 aa, Artificial Sequence
  Cyclic GFR-binding peptide
  MOD_RES (1), (1): Xaa is C or S
XRPTQVQLRSVKVAKV

SEQ ID NO: 8951 - protein, 14 aa, Artificial Sequence
  Cyclic GFR-binding peptide
PTQVQLRSVKVAKV

SEQ ID NO: 8952 - protein, 13 aa, Artificial Sequence
  Cyclic GFR-binding peptide
SRVHHRPVQVRKI

SEQ ID NO: 8953 - protein, 27 aa, Artificial Sequence
  Cyclic GFR-binding peptide
  MOD_RES (7), (7): Xaa is C or S
NDEGLEXVPTEERPVQMRKIRIKPHQG

SEQ ID NO: 8954 - protein, 21 aa, Artificial Sequence
  Cyclic GFR-binding peptide
  MOD_RES (7), (7): Xaa is C or S
NDEGLEXVPTEERSVKMAKVR

SEQ ID NO: 8955 - protein, 23 aa, Artificial Sequence
  Cyclic GFR-binding peptide
  MOD_RES (5), (5): Xaa is C or S
RNVQXRPTQVQLRSVKVAKVEIV

SEQ ID NO: 8956 - protein, 25 aa, Artificial Sequence
  Cyclic GFR-binding peptide
  MOD_RES (5), (5): Xaa is C or S
SSVKXQPSRVHHRPVQVRKIEYVRK

SEQ ID NO: 8957 - protein, 22 aa, Artificial Sequence
  Cyclic GFR-binding peptide
  MOD_RES (5), (5): Xaa is C or S
RNVQXRPTQVQLRSVKVAKVEI

SEQ ID NO: 8958 - protein, 26 aa, Artificial Sequence
  Cyclic GFR-binding peptide
  MOD_RES (5), (5): Xaa is C or S
SSVKXQPSRVHHSNITVQIMEYVRKK

SEQ ID NO: 8959 - protein, 17 aa, Artificial Sequence
  Cyclic GFR-binding peptide
  MOD_RES (2), (2): Xaa is C or S
QXRPTQVQLSNITVQIM

SEQ ID NO: 8960 - protein, 25 aa, Artificial Sequence
  Cyclic GFR-binding peptide
  MOD_RES (5), (5): Xaa is C or S
SSVKXQPSRVHHSNITVQIMEYVRK

SEQ ID NO: 8961 - protein, 18 aa, Artificial Sequence
  Cyclic GFR-binding peptide
  MOD_RES (5), (5): Xaa is C or S
EGLEXVPTEERPVQMRKI

SEQ ID NO: 8962 - protein, 20 aa, Artificial Sequence
  Cyclic GFR-binding peptide
VQLSNITVQIMEIVRKKPIF

SEQ ID NO: 8963 - protein, 18 aa, Artificial Sequence
  Cyclic GFR-binding peptide
  MOD_RES (5), (5): Xaa is C or S
EGLEXVPTGQRPVQMRKI

SEQ ID NO: 8964 - protein, 20 aa, Artificial Sequence
  Cyclic GFR-binding peptide
  MOD_RES (7), (7): Xaa is C or S
NDEGLEXVPTGQRPVQMRKI

SEQ ID NO: 8965 - protein, 17 aa, Artificial Sequence
  Cyclic GFR-binding peptide
  MOD_RES (2), (2): Xaa is C or S
QXRPTQVQLRSVKVAKV

SEQ ID NO: 8966 - protein, 29 aa, Artificial Sequence
  Cyclic GFR-binding peptide
  MOD_RES (7), (7): Xaa is C or S
NDEGLEXVPTGQRPVQMRKIRIKPHQGQH

SEQ ID NO: 8967 - protein, 25 aa, Artificial Sequence
  Cyclic GFR-binding peptide
  MOD_RES (7), (7): Xaa is C or S
NDEGLEXVPTEERSVKMAKVRIKPH

SEQ ID NO: 8968 - protein, 15 aa, Artificial Sequence
  Cyclic GFR-binding peptide
  MOD_RES (2), (2): Xaa is C or S
EXVPTGQRPVQMRKI

SEQ ID NO: 8969 - protein, 26 aa, Artificial Sequence
  Cyclic GFR-binding peptide
  MOD_RES (5), (5): Xaa is C or S
SSVKXQPSRVHHRPVQVRKIEYVRKK

SEQ ID NO: 8970 - protein, 20 aa, Artificial Sequence
  Cyclic GFR-binding peptide
  MOD_RES (7), (7): Xaa is C or S
NDEGLEXVPTEERPVQMRKI

SEQ ID NO: 8971 - protein, 19 aa, Artificial Sequence
  Cyclic GFR-binding peptide
HHRPVQVRKIEYVRKKPKL

SEQ ID NO: 8972 - protein, 17 aa, Artificial Sequence
  Cyclic GFR-binding peptide
  MOD_RES (4), (4): Xaa is C or S
GLEXVPTGQRPVQMRKI

SEQ ID NO: 8973 - protein, 19 aa, Artificial Sequence
  Cyclic GFR-binding peptide
  MOD_RES (4), (4): Xaa is C or S
SVKXQPSRVHHSNITVQIM

SEQ ID NO: 8974 - protein, 16 aa, Artificial Sequence
  Cyclic GFR-binding peptide
  MOD_RES (3), (3): Xaa is C or S
LEXVPTEERSVKMAKV

SEQ ID NO: 8975 - protein, 27 aa, Artificial Sequence
  Cyclic GFR-binding peptide
  MOD_RES (5), (5): Xaa is C or S
RNVQXRPTQVQLRSVKVAKVEIVRKKP

SEQ ID NO: 8976 - protein, 19 aa, Artificial Sequence
  Cyclic GFR-binding peptide
GQRSVKMAKVRIKPHQGQH

SEQ ID NO: 8977 - protein, 19 aa, Artificial Sequence
  Cyclic GFR-binding peptide
  MOD_RES (4), (4): Xaa is C or S
NVQXRPTQVQLSNITVQIM

SEQ ID NO: 8978 - protein, 16 aa, Artificial Sequence
  Cyclic GFR-binding peptide
  MOD_RES (1), (1): Xaa is C or S
XQPSRVHHSNITVQIM

SEQ ID NO: 8979 - protein, 26 aa, Artificial Sequence
  Cyclic GFR-binding peptide
  MOD_RES (5), (5): Xaa is C or S
RNVQXRPTQVQLSNITVQIMEIVRKK

SEQ ID NO: 8980 - protein, 18 aa, Artificial Sequence
  Cyclic GFR-binding peptide
HRPVQVRKIEYVRKKPKL

SEQ ID NO: 8981 - protein, 15 aa, Artificial Sequence
  Cyclic GFR-binding peptide
  MOD_RES (2), (2): Xaa is C or S
EXVPTEERPVQMRKI

SEQ ID NO: 8982 - protein, 21 aa, Artificial Sequence
  Cyclic GFR-binding peptide
QVQLSNITVQIMEIVRKKPIF

SEQ ID NO: 8983 - protein, 18 aa, Artificial Sequence
  Cyclic GFR-binding peptide
LRSVKVAKVEIVRKKPIF

SEQ ID NO: 8984 - protein, 18 aa, Artificial Sequence
  Cyclic GFR-binding peptide
HSNITVQIMEYVRKKPKL

SEQ ID NO: 8985 - protein, 17 aa, Artificial Sequence
  Cyclic GFR-binding peptide
SNITVQIMEIVRKKPIF

SEQ ID NO: 8986 - protein, 28 aa, Artificial Sequence
  Cyclic GFR-binding peptide
  MOD_RES (7), (7): Xaa is C or S
NDEGLEXVPTEERSVKMAKVRIKPHQGQ

SEQ ID NO: 8987 - protein, 23 aa, Artificial Sequence
  Cyclic GFR-binding peptide
  MOD_RES (17), (18): Xaa is C or S
RGVLYLISIPELDQPVXXPSASA

SEQ ID NO: 8988 - protein, 13 aa, Artificial Sequence
  Cyclic GFR-binding peptide
LYLISIPELDQPV

SEQ ID NO: 8989 - protein, 14 aa, Artificial Sequence
  Cyclic GFR-binding peptide
  MOD_RES (14), (14): Xaa is C or S
FYLISIANLKTPVX

SEQ ID NO: 8990 - protein, 13 aa, Artificial Sequence
  Cyclic GFR-binding peptide
LYLMSIPELETPV

SEQ ID NO: 8991 - protein, 19 aa, Artificial Sequence
  Cyclic GFR-binding peptide
  MOD_RES (14), (15): Xaa is C or S
KYLISIPSLRAPVXXSAPA

SEQ ID NO: 8992 - protein, 14 aa, Artificial Sequence
  Cyclic GFR-binding peptide
  MOD_RES (14), (14): Xaa is C or S
LYLISIPELDQSVX

SEQ ID NO: 8993 - protein, 17 aa, Artificial Sequence
  Cyclic GFR-binding peptide
VVNNAADKYLISIPSLR

SEQ ID NO: 8994 - protein, 19 aa, Artificial Sequence
  Cyclic GFR-binding peptide
VVNNAADKYLISIPSLRAP

SEQ ID NO: 8995 - protein, 26 aa, Artificial Sequence
  Cyclic GFR-binding peptide
  MOD_RES (20), (21): Xaa is C or S
VNSSDDIYLVSIPSLQTPAXXPKPVT

SEQ ID NO: 8996 - protein, 21 aa, Artificial Sequence
  Cyclic GFR-binding peptide
  MOD_RES (15), (16): Xaa is C or S
DKYLISIPSLKTPVXXAKSAK

SEQ ID NO: 8997 - protein, 16 aa, Artificial Sequence
  Cyclic GFR-binding peptide
  MOD_RES (14), (14): Xaa is C or S
LYLVSIPELKTPAXTP

SEQ ID NO: 8998 - protein, 19 aa, Artificial Sequence
  Cyclic GFR-binding peptide
IVNSSDDLYLVSIPELKTP

SEQ ID NO: 8999 - protein, 14 aa, Artificial Sequence
  Cyclic GFR-binding peptide
  MOD_RES (14), (14): Xaa is C or S
IYLISIPSLKTPVX

SEQ ID NO: 9000 - protein, 14 aa, Artificial Sequence
  Cyclic GFR-binding peptide
  MOD_RES (14), (14): Xaa is C or S
KYLISIPSLKTPVX

SEQ ID NO: 9001 - protein, 18 aa, Artificial Sequence
  Cyclic GFR-binding peptide
VVNNAADLYLISIPELRA

SEQ ID NO: 9002 - protein, 24 aa, Artificial Sequence
  Cyclic GFR-binding peptide
  MOD_RES (18), (19): Xaa is C or S
ENEDLYLMSIPELETPVXXAKPIK

SEQ ID NO: 9003 - protein, 18 aa, Artificial Sequence
  Cyclic GFR-binding peptide
YTVVGKDFYLISIANLKT

SEQ ID NO: 9004 - protein, 22 aa, Artificial Sequence
  Cyclic GFR-binding peptide
  MOD_RES (16), (17): Xaa is C or S
SDLYLVSIPELKTPAXXAKPVA

SEQ ID NO: 9005 - protein, 22 aa, Artificial Sequence
  Cyclic GFR-binding peptide
  MOD_RES (16), (17): Xaa is C or S
DDLYLVSIPELKTPVXXAKGVK

SEQ ID NO: 9006 - protein, 19 aa, Artificial Sequence
  Cyclic GFR-binding peptide
VKPTRGVLYLISIPELDQP

SEQ ID NO: 9007 - protein, 17 aa, Artificial Sequence
  Cyclic GFR-binding peptide
  MOD_RES (14), (15): Xaa is C or S
LYLISIPELDQSVXXPS

SEQ ID NO: 9008 - protein, 25 aa, Artificial Sequence
  Cyclic GFR-binding peptide
  MOD_RES (19), (20): Xaa is C or S
KDYEDIYLMSIPSLETPVXXAKPIS

SEQ ID NO: 9009 - protein, 26 aa, Artificial Sequence
  Cyclic GFR-binding peptide
  MOD_RES (20), (21): Xaa is C or S
KPTRGVLYLISIPELDQPVXXPSASA

SEQ ID NO: 9010 - protein, 16 aa, Artificial Sequence
  Cyclic GFR-binding peptide
  MOD_RES (14), (15): Xaa is C or S
FYLISIANLRAPVXXS

SEQ ID NO: 9011 - protein, 25 aa, Artificial Sequence
  Cyclic GFR-binding peptide
  MOD_RES (19), (20): Xaa is C or S
KENEDLYLMSIPELETPVXXAKPIK

SEQ ID NO: 9012 - protein, 22 aa, Artificial Sequence
  Cyclic GFR-binding peptide
  MOD_RES (16), (17): Xaa is C or S
EDLYLMSIPELETPVXXAKPIS

SEQ ID NO: 9013 - protein, 19 aa, Artificial Sequence
  Cyclic GFR-binding peptide
  MOD_RES (14), (15): Xaa is C or S
FYLISIANLRAPVXXSAPA

SEQ ID NO: 9014 - protein, 17 aa, Artificial Sequence
  Cyclic GFR-binding peptide
  MOD_RES (14), (14): Xaa is C or S
LYLVSIPELKTPAXTPK

SEQ ID NO: 9015 - protein, 18 aa, Artificial Sequence
  Cyclic GFR-binding peptide
IVNSSDDIYLVSIPSLQT

SEQ ID NO: 9016 - protein, 18 aa, Artificial Sequence
  Cyclic GFR-binding peptide
IVNSSDDIYLVSIPSLKT

SEQ ID NO: 9017 - protein, 17 aa, Artificial Sequence
  Cyclic GFR-binding peptide
VKPKRGVLYLISIPELA

SEQ ID NO: 9018 - protein, 16 aa, Artificial Sequence
  Cyclic GFR-binding peptide
  MOD_RES (14), (15): Xaa is C or S
KYLISIPSLRAPVXXS

SEQ ID NO: 9019 - protein, 17 aa, Artificial Sequence
  Cyclic GFR-binding peptide
  MOD_RES (14), (15): Xaa is C or S
LYLVSIPELKTPAXXAK

SEQ ID NO: 9020 - protein, 23 aa, Artificial Sequence
  Cyclic GFR-binding peptide
  MOD_RES (17), (18): Xaa is C or S
MDDIYLVSIPSLKTPVXXAKGVK

SEQ ID NO: 9021 - protein, 24 aa, Artificial Sequence
  Cyclic GFR-binding peptide
  MOD_RES (18), (19): Xaa is C or S
NAADFYLISIANLRAPVXXSAPAA

SEQ ID NO: 9022 - protein, 15 aa, Artificial Sequence
  Cyclic GFR-binding peptide
IVNSSDDLYLVSIPE

SEQ ID NO: 9023 - protein, 15 aa, Artificial Sequence
  Cyclic GFR-binding peptide
  MOD_RES (14), (15): Xaa is C or S
LYLMSIPELETPVXX

SEQ ID NO: 9024 - protein, 17 aa, Artificial Sequence
  Cyclic GFR-binding peptide
VKPTRGVLYLISIPELD

SEQ ID NO: 9025 - protein, 19 aa, Artificial Sequence
  Cyclic GFR-binding peptide
VVNNAADFYLISIANLRAP

SEQ ID NO: 9026 - protein, 24 aa, Artificial Sequence
  Cyclic GFR-binding peptide
  MOD_RES (18), (19): Xaa is C or S
GMDDLYLVSIPELKTPVXXAKGVK

SEQ ID NO: 9027 - protein, 25 aa, Artificial Sequence
  Cyclic GFR-binding peptide
  MOD_RES (19), (20): Xaa is C or S
PKRGVLYLISIPELAQPVXXPAASA

SEQ ID NO: 9028 - protein, 15 aa, Artificial Sequence
  Cyclic GFR-binding peptide
  MOD_RES (14), (15): Xaa is C or S
LYLISIPELDQPVXX

SEQ ID NO: 9029 - protein, 18 aa, Artificial Sequence
  Cyclic GFR-binding peptide
VKPKRGVIYLISIPSLAQ

SEQ ID NO: 9030 - protein, 14 aa, Artificial Sequence
  Cyclic GFR-binding peptide
  MOD_RES (14), (14): Xaa is C or S
LYLVSIPELQTPAX

SEQ ID NO: 9031 - protein, 17 aa, Artificial Sequence
  Cyclic GFR-binding peptide
IKPTKGIIYLISIPSLD

SEQ ID NO: 9032 - protein, 26 aa, Artificial Sequence
  Cyclic GFR-binding peptide
  MOD_RES (20), (21): Xaa is C or S
KPTKGILYLISIPELDQSVXXPSASA

SEQ ID NO: 9033 - protein, 17 aa, Artificial Sequence
  Cyclic GFR-binding peptide
VVNNAADFYLISIANLR

SEQ ID NO: 9034 - protein, 21 aa, Artificial Sequence
  Cyclic GFR-binding peptide
  MOD_RES (15), (16): Xaa is C or S
DIYLMSIPSLETPVXXAKPIK

SEQ ID NO: 9035 - protein, 22 aa, Artificial Sequence
  Cyclic GFR-binding peptide
  MOD_RES (16), (17): Xaa is C or S
DDIYLVSIPSLKTPVXXAKGVK

SEQ ID NO: 9036 - protein, 19 aa, Artificial Sequence
  Cyclic GFR-binding peptide
  MOD_RES (14), (15): Xaa is C or S
LYLISIPELAQPVXXPAAS

SEQ ID NO: 9037 - protein, 27 aa, Artificial Sequence
  Cyclic GFR-binding peptide
  MOD_RES (21), (22): Xaa is C or S
IKPTKGIIYLISIPSLDQSVXXPSASA

SEQ ID NO: 9038 - protein, 17 aa, Artificial Sequence
  Cyclic GFR-binding peptide
IVNNSSDLYLVSIPELK

SEQ ID NO: 9039 - protein, 27 aa, Artificial Sequence
  Cyclic GFR-binding peptide
  MOD_RES (21), (21): Xaa is C or S
IVNSSDDIYLVSIPSLKTPAXTPKTVH

SEQ ID NO: 9040 - protein, 24 aa, Artificial Sequence
  Cyclic GFR-binding peptide
  MOD_RES (18), (18): Xaa is C or S
SSDDIYLVSIPSLKTPAXTPKTVH

SEQ ID NO: 9041 - protein, 23 aa, Artificial Sequence
  Cyclic GFR-binding peptide
  MOD_RES (17), (18): Xaa is C or S
NEDIYLMSIPSLETPVXXAKPIK

SEQ ID NO: 9042 - protein, 27 aa, Artificial Sequence
  Cyclic GFR-binding peptide
  MOD_RES (21), (22): Xaa is C or S
VVKENEDLYLMSIPELETPVXXAKPIK

SEQ ID NO: 9043 - protein, 16 aa, Artificial Sequence
  Cyclic GFR-binding peptide
IVNNSSDLYLVSIPEL

SEQ ID NO: 9044 - protein, 19 aa, Artificial Sequence
  Cyclic GFR-binding peptide
YTVVGKDFYLISIANLKTP

SEQ ID NO: 9045 - protein, 16 aa, Artificial Sequence
  Cyclic GFR-binding peptide
  MOD_RES (14), (15): Xaa is C or S
LYLVSIPELKTPAXXP

SEQ ID NO: 9046 - protein, 21 aa, Artificial Sequence
  Cyclic GFR-binding peptide
  MOD_RES (15), (15): Xaa is C or S
DIYLVSIPSLKTPAXTPKTVH

SEQ ID NO: 9047 - protein, 17 aa, Artificial Sequence
  Cyclic GFR-binding peptide
  MOD_RES (14), (15): Xaa is C or S
IYLMSIPSLETPVXXAK

SEQ ID NO: 9048 - protein, 15 aa, Artificial Sequence
  Cyclic GFR-binding peptide
IVNNSSDIYLVSIPS

SEQ ID NO: 9049 - protein, 19 aa, Artificial Sequence
  Cyclic GFR-binding peptide
VVKDYEDIYLMSIPSLETP

SEQ ID NO: 9050 - protein, 27 aa, Artificial Sequence
  Cyclic GFR-binding peptide
  MOD_RES (21), (22): Xaa is C or S
VVNNAADLYLISIPELRAPVXXSAPAA

SEQ ID NO: 9051 - protein, 19 aa, Artificial Sequence
  Cyclic GFR-binding peptide
VVNNAADLYLISIPELRAP

SEQ ID NO: 9052 - protein, 24 aa, Artificial Sequence
  Cyclic GFR-binding peptide
  MOD_RES (18), (19): Xaa is C or S
TRGVLYLISIPELDQPVXXPSASA

SEQ ID NO: 9053 - protein, 19 aa, Artificial Sequence
  Cyclic GFR-binding peptide
VKPKRGVLYLISIPELAQP

SEQ ID NO: 9054 - protein, 19 aa, Artificial Sequence
  Cyclic GFR-binding peptide
  MOD_RES (14), (15): Xaa is C or S
LYLISIPELDQPVXXPSAS

SEQ ID NO: 9055 - protein, 20 aa, Artificial Sequence
  Cyclic GFR-binding peptide
  MOD_RES (14), (15): Xaa is C or S
LYLVSIPELKTPVXXAKGVK

SEQ ID NO: 9056 - protein, 20 aa, Artificial Sequence
  Cyclic GFR-binding peptide
  MOD_RES (14), (15): Xaa is C or S
IYLVSIPSLQTPAXXPKPVT

SEQ ID NO: 9057 - protein, 17 aa, Artificial Sequence
  Cyclic GFR-binding peptide
  MOD_RES (14), (15): Xaa is C or S
LYLISIPELAQPVXXPA

SEQ ID NO: 9058 - protein, 14 aa, Artificial Sequence
  Cyclic GFR-binding peptide
  MOD_RES (14), (14): Xaa is C or S
IYLVSIPSLKTPVX

SEQ ID NO: 9059 - protein, 24 aa, Artificial Sequence
  Cyclic GFR-binding peptide
  MOD_RES (18), (19): Xaa is C or S
NAADKYLISIPSLRAPVXXSAPAA

SEQ ID NO: 9060 - protein, 23 aa, Artificial Sequence
  Cyclic GFR-binding peptide
  MOD_RES (17), (18): Xaa is C or S
GKDKYLISIPSLKTPVXXAKSAK

SEQ ID NO: 9061 - protein, 24 aa, Artificial Sequence
  Cyclic GFR-binding peptide
  MOD_RES (18), (19): Xaa is C or S
NAADLYLISIPELRAPVXXSAPAA

SEQ ID NO: 9062 - protein, 21 aa, Artificial Sequence
  Cyclic GFR-binding peptide
  MOD_RES (15), (16): Xaa is C or S
DFYLISIANLKTPVXXAKSAK

SEQ ID NO: 9063 - protein, 27 aa, Artificial Sequence
  Cyclic GFR-binding peptide
  MOD_RES (21), (21): Xaa is C or S
IVNSSDDLYLVSIPELKTPAXTPKTVH

SEQ ID NO: 9064 - protein, 20 aa, Artificial Sequence
  Cyclic GFR-binding peptide
  MOD_RES (14), (15): Xaa is C or S
IYLVSIPSLKTPAXXAKPVA

SEQ ID NO: 9065 - protein, 17 aa, Artificial Sequence
  Cyclic GFR-binding peptide
IVNSSDDLYLVSIPELK

SEQ ID NO: 9066 - protein, 17 aa, Artificial Sequence
  Cyclic GFR-binding peptide
IVNSSDDLYLVSIPELQ

SEQ ID NO: 9067 - protein, 20 aa, Artificial Sequence
  Cyclic GFR-binding peptide
  MOD_RES (14), (15): Xaa is C or S
LYLVSIPELQTPAXXPKPVT

SEQ ID NO: 9068 - protein, 19 aa, Artificial Sequence
  Cyclic GFR-binding peptide
  MOD_RES (14), (15): Xaa is C or S
LYLVSIPELQTPAXXPKPV

SEQ ID NO: 9069 - protein, 23 aa, Artificial Sequence
  Cyclic GFR-binding peptide
  MOD_RES (17), (17): Xaa is C or S
SDDIYLVSIPSLKTPAXTPKTVH

SEQ ID NO: 9070 - protein, 19 aa, Artificial Sequence
  Cyclic GFR-binding peptide
  MOD_RES (14), (15): Xaa is C or S
IYLISIPSLDQSVXXPSAS

SEQ ID NO: 9071 - protein, 16 aa, Artificial Sequence
  Cyclic GFR-binding peptide
IVNNSSDIYLVSIPSL

SEQ ID NO: 9072 - protein, 22 aa, Artificial Sequence
  Cyclic GFR-binding peptide
  MOD_RES (16), (16): Xaa is C or S
DDIYLVSIPSLKTPAXTPKTVH

SEQ ID NO: 9073 - protein, 15 aa, Artificial Sequence
  Cyclic GFR-binding peptide
IVNNSSDLYLVSIPE

SEQ ID NO: 9074 - protein, 23 aa, Artificial Sequence
  Cyclic GFR-binding peptide
  MOD_RES (17), (18): Xaa is C or S
SDDLYLVSIPELKTPAXXPKPVY

SEQ ID NO: 9075 - protein, 22 aa, Artificial Sequence
  Cyclic GFR-binding peptide
  MOD_RES (16), (17): Xaa is C or S
EDLYLMSIPELETPVXXAKPIK

SEQ ID NO: 9076 - protein, 17 aa, Artificial Sequence
  Cyclic GFR-binding peptide
IVNNSSDIYLVSIPSLK

SEQ ID NO: 9077 - protein, 13 aa, Artificial Sequence
  Cyclic GFR-binding peptide
FYLISIANLKTPV

SEQ ID NO: 9078 - protein, 25 aa, Artificial Sequence
  Cyclic GFR-binding peptide
  MOD_RES (19), (20): Xaa is C or S
NSSDDLYLVSIPELKTPAXXPKPVY

SEQ ID NO: 9079 - protein, 15 aa, Artificial Sequence
  Cyclic GFR-binding peptide
  MOD_RES (14), (15): Xaa is C or S
FYLISIANLKTPVXX

SEQ ID NO: 9080 - protein, 16 aa, Artificial Sequence
  Cyclic GFR-binding peptide
VVNNAADLYLISIPEL

SEQ ID NO: 9081 - protein, 18 aa, Artificial Sequence
  Cyclic GFR-binding peptide
YTVVGKDKYLISIPSLKT

SEQ ID NO: 9082 - protein, 27 aa, Artificial Sequence
  Cyclic GFR-binding peptide
  MOD_RES (21), (22): Xaa is C or S
VKPKRGVLYLISIPELAQPVXXPAASA

SEQ ID NO: 9083 - protein, 15 aa, Artificial Sequence
  Cyclic GFR-binding peptide
YTVVGKDFYLISIAN

SEQ ID NO: 9084 - protein, 25 aa, Artificial Sequence
  Cyclic GFR-binding peptide
  MOD_RES (19), (20): Xaa is C or S
PTRGVLYLISIPELDQPVXXPSASA

SEQ ID NO: 9085 - protein, 22 aa, Artificial Sequence
  Cyclic GFR-binding peptide
  MOD_RES (16), (17): Xaa is C or S
EDIYLMSIPSLETPVXXAKPIS

SEQ ID NO: 9086 - protein, 22 aa, Artificial Sequence
  Cyclic GFR-binding peptide
  MOD_RES (16), (17): Xaa is C or S
GVLYLISIPELAQPVXXPAASA

SEQ ID NO: 9087 - protein, 20 aa, Artificial Sequence
  Cyclic GFR-binding peptide
  MOD_RES (14), (15): Xaa is C or S
IYLISIPSLDQPVXXPSASA

SEQ ID NO: 9088 - protein, 25 aa, Artificial Sequence
  Cyclic GFR-binding peptide
  MOD_RES (19), (20): Xaa is C or S
VGMDDIYLVSIPSLKTPVXXAKGVK

SEQ ID NO: 9089 - protein, 17 aa, Artificial Sequence
  Cyclic GFR-binding peptide
  MOD_RES (14), (15): Xaa is C or S
LYLVSIPELKTPVXXAK

SEQ ID NO: 9090 - protein, 25 aa, Artificial Sequence
  Cyclic GFR-binding peptide
  MOD_RES (19), (20): Xaa is C or S
PTRGVIYLISIPSLDQPVXXPSASA

SEQ ID NO: 9091 - protein, 26 aa, Artificial Sequence
  Cyclic GFR-binding peptide
  MOD_RES (20), (21): Xaa is C or S
TVVGKDKYLISIPSLKTPVXXAKSAK

SEQ ID NO: 9092 - protein, 14 aa, Artificial Sequence
  Cyclic GFR-binding peptide
  MOD_RES (14), (14): Xaa is C or S
LYLISIPELAQPVX

SEQ ID NO: 9093 - protein, 27 aa, Artificial Sequence
  Cyclic GFR-binding peptide
  MOD_RES (21), (22): Xaa is C or S
VVNNAADKYLISIPSLRAPVXXSAPAA

SEQ ID NO: 9094 - protein, 18 aa, Artificial Sequence
  Cyclic GFR-binding peptide
  MOD_RES (14), (14): Xaa is C or S
LYLVSIPELKTPAXTPKT

SEQ ID NO: 9095 - protein, 17 aa, Artificial Sequence
  Cyclic GFR-binding peptide
IKPTKGILYLISIPELD

SEQ ID NO: 9096 - protein, 19 aa, Artificial Sequence
  Cyclic GFR-binding peptide
IVNSSDDLYLVSIPELQTP

SEQ ID NO: 9097 - protein, 17 aa, Artificial Sequence
  Cyclic GFR-binding peptide
  MOD_RES (14), (15): Xaa is C or S
LYLVSIPELQTPAXXPK

SEQ ID NO: 9098 - protein, 24 aa, Artificial Sequence
  Cyclic GFR-binding peptide
  MOD_RES (18), (19): Xaa is C or S
NSSDIYLVSIPSLKTPAXXAKPVA

SEQ ID NO: 9099 - protein, 26 aa, Artificial Sequence
  Cyclic GFR-binding peptide
  MOD_RES (20), (21): Xaa is C or S
VNSSDDIYLVSIPSLKTPAXXPKPVY

SEQ ID NO: 9100 - protein, 16 aa, Artificial Sequence
  Cyclic GFR-binding peptide
IVNSSDDLYLVSIPEL

SEQ ID NO: 9101 - protein, 27 aa, Artificial Sequence
  Cyclic GFR-binding peptide
  MOD_RES (21), (22): Xaa is C or S
VVKDYEDLYLMSIPELETPVXXAKPIS

SEQ ID NO: 9102 - protein, 18 aa, Artificial Sequence
  Cyclic GFR-binding peptide
VKPTRGVIYLISIPSLDQ

SEQ ID NO: 9103 - protein, 19 aa, Artificial Sequence
  Cyclic GFR-binding peptide
IVNNSSDIYLVSIPSLKTP

SEQ ID NO: 9104 - protein, 23 aa, Artificial Sequence
  Cyclic GFR-binding peptide
  MOD_RES (17), (18): Xaa is C or S
AADLYLISIPELRAPVXXSAPAA

SEQ ID NO: 9105 - protein, 16 aa, Artificial Sequence
  Cyclic GFR-binding peptide
  MOD_RES (14), (15): Xaa is C or S
LYLMSIPELETPVXXA

SEQ ID NO: 9106 - protein, 24 aa, Artificial Sequence
  Cyclic GFR-binding peptide
  MOD_RES (18), (19): Xaa is C or S
NSSDLYLVSIPELKTPAXXAKPVA

SEQ ID NO: 9107 - protein, 23 aa, Artificial Sequence
  Cyclic GFR-binding peptide
  MOD_RES (17), (18): Xaa is C or S
KGILYLISIPELDQSVXXPSASA

SEQ ID NO: 9108 - protein, 15 aa, Artificial Sequence
  Cyclic GFR-binding peptide
VVKDYEDIYLMSIPS

SEQ ID NO: 9109 - protein, 22 aa, Artificial Sequence
  Cyclic GFR-binding peptide
  MOD_RES (16), (17): Xaa is C or S
GVIYLISIPSLAQPVXXPAASA

SEQ ID NO: 9110 - protein, 21 aa, Artificial Sequence
  Cyclic GFR-binding peptide
  MOD_RES (15), (16): Xaa is C or S
DIYLISIPSLKTPVXXAKSAK

SEQ ID NO: 9111 - protein, 13 aa, Artificial Sequence
  Cyclic GFR-binding peptide
LYLVSIPELQTPA

SEQ ID NO: 9112 - protein, 14 aa, Artificial Sequence
  Cyclic GFR-binding peptide
  MOD_RES (14), (14): Xaa is C or S
LYLISIPELDQPVX

SEQ ID NO: 9113 - protein, 19 aa, Artificial Sequence
  Cyclic GFR-binding peptide
  MOD_RES (14), (15): Xaa is C or S
LYLVSIPELKTPAXXAKPV

SEQ ID NO: 9114 - protein, 15 aa, Artificial Sequence
  Cyclic GFR-binding peptide
  MOD_RES (14), (15): Xaa is C or S
LYLVSIPELQTPAXX

SEQ ID NO: 9115 - protein, 21 aa, Artificial Sequence
  Cyclic GFR-binding peptide
  MOD_RES (15), (16): Xaa is C or S
VIYLISIPSLAQPVXXPAASA

SEQ ID NO: 9116 - protein, 26 aa, Artificial Sequence
  Cyclic GFR-binding peptide
  MOD_RES (20), (21): Xaa is C or S
VNNSSDLYLVSIPELKTPAXXAKPVA

SEQ ID NO: 9117 - protein, 20 aa, Artificial Sequence
  Cyclic GFR-binding peptide
  MOD_RES (14), (15): Xaa is C or S
KYLISIPSLKTPVXXAKSAK

SEQ ID NO: 9118 - protein, 20 aa, Artificial Sequence
  Cyclic GFR-binding peptide
  MOD_RES (14), (15): Xaa is C or S
IYLISIPSLKTPVXXAKSAK

SEQ ID NO: 9119 - protein, 13 aa, Artificial Sequence
  Cyclic GFR-binding peptide
LYLISIPELRAPV

SEQ ID NO: 9120 - protein, 15 aa, Artificial Sequence
  Cyclic GFR-binding peptide
  MOD_RES (14), (15): Xaa is C or S
IYLVSIPSLKTPAXX

SEQ ID NO: 9121 - protein, 19 aa, Artificial Sequence
  Cyclic GFR-binding peptide
  MOD_RES (14), (15): Xaa is C or S
LYLISIPELRAPVXXSAPA

SEQ ID NO: 9122 - protein, 16 aa, Artificial Sequence
  Cyclic GFR-binding peptide
  MOD_RES (14), (15): Xaa is C or S
IYLVSIPSLKTPAXXP

SEQ ID NO: 9123 - protein, 22 aa, Artificial Sequence
  Cyclic GFR-binding peptide
  MOD_RES (16), (17): Xaa is C or S
DDLYLVSIPELKTPAXXPKPVY

SEQ ID NO: 9124 - protein, 19 aa, Artificial Sequence
  Cyclic GFR-binding peptide
  MOD_RES (14), (15): Xaa is C or S
IYLISIPSLAQPVXXPAAS

SEQ ID NO: 9125 - protein, 18 aa, Artificial Sequence
  Cyclic GFR-binding peptide
  MOD_RES (14), (15): Xaa is C or S
LYLMSIPELETPVXXAKP

SEQ ID NO: 9126 - protein, 17 aa, Artificial Sequence
  Cyclic GFR-binding peptide
VKPTRGVIYLISIPSLD

SEQ ID NO: 9127 - protein, 21 aa, Artificial Sequence
  Cyclic GFR-binding peptide
  MOD_RES (15), (16): Xaa is C or S
DKYLISIPSLRAPVXXSAPAA

SEQ ID NO: 9128 - protein, 13 aa, Artificial Sequence
  Cyclic GFR-binding peptide
IYLISIPSLDQPV

SEQ ID NO: 9129 - protein, 14 aa, Artificial Sequence
  Cyclic GFR-binding peptide
  MOD_RES (14), (14): Xaa is C or S
IYLVSIPSLQTPAX

SEQ ID NO: 9130 - protein, 15 aa, Artificial Sequence
  Cyclic GFR-binding peptide
  MOD_RES (14), (15): Xaa is C or S
IYLVSIPSLKTPVXX

SEQ ID NO: 9131 - protein, 15 aa, Artificial Sequence
  Cyclic GFR-binding peptide
TPVGMDDIYLVSIPS

SEQ ID NO: 9132 - protein, 22 aa, Artificial Sequence
  Cyclic GFR-binding peptide
  MOD_RES (16), (17): Xaa is C or S
DDLYLVSIPELQTPAXXPKPVT

SEQ ID NO: 9133 - protein, 18 aa, Artificial Sequence
  Cyclic GFR-binding peptide
VKPKRGVLYLISIPELAQ

SEQ ID NO: 9134 - protein, 16 aa, Artificial Sequence
  Cyclic GFR-binding peptide
IKPTKGILYLISIPEL

SEQ ID NO: 9135 - protein, 18 aa, Artificial Sequence
  Cyclic GFR-binding peptide
  MOD_RES (14), (15): Xaa is C or S
LYLVSIPELKTPAXXPKP

SEQ ID NO: 9136 - protein, 20 aa, Artificial Sequence
  Cyclic GFR-binding peptide
  MOD_RES (14), (15): Xaa is C or S
IYLMSIPSLETPVXXAKPIS

SEQ ID NO: 9137 - protein, 23 aa, Artificial Sequence
  Cyclic GFR-binding peptide
  MOD_RES (17), (18): Xaa is C or S
YEDLYLMSIPELETPVXXAKPIS

SEQ ID NO: 9138 - protein, 24 aa, Artificial Sequence
  Cyclic GFR-binding peptide
  MOD_RES (18), (19): Xaa is C or S
KRGVLYLISIPELAQPVXXPAASA

SEQ ID NO: 9139 - protein, 18 aa, Artificial Sequence
  Cyclic GFR-binding peptide
  MOD_RES (14), (15): Xaa is C or S
LYLVSIPELKTPVXXAKG

SEQ ID NO: 9140 - protein, 19 aa, Artificial Sequence
  Cyclic GFR-binding peptide
  MOD_RES (14), (15): Xaa is C or S
IYLISIPSLDQPVXXPSAS

SEQ ID NO: 9141 - protein, 20 aa, Artificial Sequence
  Cyclic GFR-binding peptide
  MOD_RES (14), (15): Xaa is C or S
FYLISIANLKTPVXXAKSAK

SEQ ID NO: 9142 - protein, 22 aa, Artificial Sequence
  Cyclic GFR-binding peptide
  MOD_RES (16), (17): Xaa is C or S
DDIYLVSIPSLKTPAXXPKPVY

SEQ ID NO: 9143 - protein, 20 aa, Artificial Sequence
  Cyclic GFR-binding peptide
  MOD_RES (14), (15): Xaa is C or S
IYLVSIPSLKTPAXXPKPVY

SEQ ID NO: 9144 - protein, 16 aa, Artificial Sequence
  Cyclic GFR-binding peptide
  MOD_RES (14), (15): Xaa is C or S
FYLISIANLKTPVXXA

SEQ ID NO: 9145 - protein, 16 aa, Artificial Sequence
  Cyclic GFR-binding peptide
VVKENEDIYLMSIPSL

SEQ ID NO: 9146 - protein, 15 aa, Artificial Sequence
  Cyclic GFR-binding peptide
VVKDYEDLYLMSIPE

SEQ ID NO: 9147 - protein, 25 aa, Artificial Sequence
  Cyclic GFR-binding peptide
  MOD_RES (19), (20): Xaa is C or S
PTKGIIYLISIPSLDQSVXXPSASA

SEQ ID NO: 9148 - protein, 17 aa, Artificial Sequence
  Cyclic GFR-binding peptide
  MOD_RES (14), (15): Xaa is C or S
FYLISIANLRAPVXXSA

SEQ ID NO: 9149 - protein, 23 aa, Artificial Sequence
  Cyclic GFR-binding peptide
  MOD_RES (17), (18): Xaa is C or S
SSDIYLVSIPSLKTPAXXAKPVA

SEQ ID NO: 9150 - protein, 24 aa, Artificial Sequence
  Cyclic GFR-binding peptide
  MOD_RES (18), (19): Xaa is C or S
TRGVIYLISIPSLDQPVXXPSASA

SEQ ID NO: 9151 - protein, 19 aa, Artificial Sequence
  Cyclic GFR-binding peptide
  MOD_RES (14), (15): Xaa is C or S
IYLVSIPSLQTPAXXPKPV

SEQ ID NO: 9152 - protein, 19 aa, Artificial Sequence
  Cyclic GFR-binding peptide
  MOD_RES (14), (15): Xaa is C or S
FYLISIANLKTPVXXAKSA

SEQ ID NO: 9153 - protein, 22 aa, Artificial Sequence
  Cyclic GFR-binding peptide
  MOD_RES (16), (17): Xaa is C or S
DDIYLVSIPSLQTPAXXPKPVT

SEQ ID NO: 9154 - protein, 25 aa, Artificial Sequence
  Cyclic GFR-binding peptide
  MOD_RES (19), (20): Xaa is C or S
NNSSDLYLVSIPELKTPAXXAKPVA

SEQ ID NO: 9155 - protein, 24 aa, Artificial Sequence
  Cyclic GFR-binding peptide
  MOD_RES (18), (19): Xaa is C or S
GMDDIYLVSIPSLKTPVXXAKGVK

SEQ ID NO: 9156 - protein, 19 aa, Artificial Sequence
  Cyclic GFR-binding peptide
  MOD_RES (14), (15): Xaa is C or S
IYLVSIPSLKTPAXXPKPV

SEQ ID NO: 9157 - protein, 17 aa, Artificial Sequence
  Cyclic GFR-binding peptide
  MOD_RES (14), (15): Xaa is C or S
IYLVSIPSLKTPVXXAK

SEQ ID NO: 9158 - protein, 16 aa, Artificial Sequence
  Cyclic GFR-binding peptide
  MOD_RES (14), (14): Xaa is C or S
IYLVSIPSLKTPAXTP

SEQ ID NO: 9159 - protein, 19 aa, Artificial Sequence
  Cyclic GFR-binding peptide
IVNSSDDIYLVSIPSLKTP

SEQ ID NO: 9160 - protein, 25 aa, Artificial Sequence
  Cyclic GFR-binding peptide
  MOD_RES (19), (20): Xaa is C or S
NNAADLYLISIPELRAPVXXSAPAA

SEQ ID NO: 9161 - protein, 27 aa, Artificial Sequence
  Cyclic GFR-binding peptide
  MOD_RES (21), (22): Xaa is C or S
TPVGMDDLYLVSIPELKTPVXXAKGVK

SEQ ID NO: 9162 - protein, 27 aa, Artificial Sequence
  Cyclic GFR-binding peptide
  MOD_RES (21), (22): Xaa is C or S
VVNNAADFYLISIANLRAPVXXSAPAA

SEQ ID NO: 9163 - protein, 19 aa, Artificial Sequence
  Cyclic GFR-binding peptide
IVNSSDDIYLVSIPSLQTP

SEQ ID NO: 9164 - protein, 25 aa, Artificial Sequence
  Cyclic GFR-binding peptide
  MOD_RES (19), (19): Xaa is C or S
NSSDDIYLVSIPSLKTPAXTPKTVH

SEQ ID NO: 9165 - protein, 15 aa, Artificial Sequence
  Cyclic GFR-binding peptide
  MOD_RES (14), (15): Xaa is C or S
LYLISIPELAQPVXX

SEQ ID NO: 9166 - protein, 13 aa, Artificial Sequence
  Cyclic GFR-binding peptide
IYLISIPSLDQSV

SEQ ID NO: 9167 - protein, 24 aa, Artificial Sequence
  Cyclic GFR-binding peptide
  MOD_RES (18), (18): Xaa is C or S
SSDDLYLVSIPELKTPAXTPKTVH

SEQ ID NO: 9168 - protein, 20 aa, Artificial Sequence
  Cyclic GFR-binding peptide
  MOD_RES (14), (15): Xaa is C or S
IYLISIPSLDQSVXXPSASA

SEQ ID NO: 9169 - protein, 17 aa, Artificial Sequence
  Cyclic GFR-binding peptide
TPVGMDDIYLVSIPSLK

SEQ ID NO: 9170 - protein, 21 aa, Artificial Sequence
  Cyclic GFR-binding peptide
  MOD_RES (15), (16): Xaa is C or S
DIYLVSIPSLQTPAXXPKPVT

SEQ ID NO: 9171 - protein, 16 aa, Artificial Sequence
  Cyclic GFR-binding peptide
VVKDYEDIYLMSIPSL

SEQ ID NO: 9172 - protein, 21 aa, Artificial Sequence
  Cyclic GFR-binding peptide
  MOD_RES (15), (16): Xaa is C or S
DIYLMSIPSLETPVXXAKPIS

SEQ ID NO: 9173 - protein, 16 aa, Artificial Sequence
  Cyclic GFR-binding peptide
  MOD_RES (14), (15): Xaa is C or S
IYLVSIPSLQTPAXXP

SEQ ID NO: 9174 - protein, 18 aa, Artificial Sequence
  Cyclic GFR-binding peptide
IKPTKGIIYLISIPSLDQ

SEQ ID NO: 9175 - protein, 18 aa, Artificial Sequence
  Cyclic GFR-binding peptide
  MOD_RES (14), (15): Xaa is C or S
LYLISIPELAQPVXXPAA

SEQ ID NO: 9176 - protein, 15 aa, Artificial Sequence
  Cyclic GFR-binding peptide
  MOD_RES (14), (15): Xaa is C or S
IYLISIPSLKTPVXX

SEQ ID NO: 9177 - protein, 15 aa, Artificial Sequence
  Cyclic GFR-binding peptide
  MOD_RES (14), (15): Xaa is C or S
KYLISIPSLKTPVXX

SEQ ID NO: 9178 - protein, 21 aa, Artificial Sequence
  Cyclic GFR-binding peptide
  MOD_RES (15), (16): Xaa is C or S
DFYLISIANLRAPVXXSAPAA

SEQ ID NO: 9179 - protein, 24 aa, Artificial Sequence
  Cyclic GFR-binding peptide
  MOD_RES (18), (19): Xaa is C or S
DYEDIYLMSIPSLETPVXXAKPIS

SEQ ID NO: 9180 - protein, 17 aa, Artificial Sequence
  Cyclic GFR-binding peptide
  MOD_RES (14), (15): Xaa is C or S
LYLISIPELDQPVXXPS

SEQ ID NO: 9181 - protein, 22 aa, Artificial Sequence
  Cyclic GFR-binding peptide
  MOD_RES (16), (16): Xaa is C or S
DDLYLVSIPELKTPAXTPKTVH

SEQ ID NO: 9182 - protein, 16 aa, Artificial Sequence
  Cyclic GFR-binding peptide
VKPKRGVLYLISIPEL

SEQ ID NO: 9183 - protein, 25 aa, Artificial Sequence
  Cyclic GFR-binding peptide
  MOD_RES (19), (20): Xaa is C or S
NNSSDIYLVSIPSLKTPAXXAKPVA

SEQ ID NO: 9184 - protein, 19 aa, Artificial Sequence
  Cyclic GFR-binding peptide
VKPTRGVIYLISIPSLDQP

SEQ ID NO: 9185 - protein, 27 aa, Artificial Sequence
  Cyclic GFR-binding peptide
  MOD_RES (21), (22): Xaa is C or S
IVNSSDDLYLVSIPELQTPAXXPKPVT

SEQ ID NO: 9186 - protein, 25 aa, Artificial Sequence
  Cyclic GFR-binding peptide
  MOD_RES (19), (20): Xaa is C or S
VVGKDKYLISIPSLKTPVXXAKSAK

SEQ ID NO: 9187 - protein, 23 aa, Artificial Sequence
  Cyclic GFR-binding peptide
  MOD_RES (17), (18): Xaa is C or S
RGVIYLISIPSLAQPVXXPAASA

SEQ ID NO: 9188 - protein, 14 aa, Artificial Sequence
  Cyclic GFR-binding peptide
  MOD_RES (14), (14): Xaa is C or S
LYLMSIPELETPVX

SEQ ID NO: 9189 - protein, 18 aa, Artificial Sequence
  Cyclic GFR-binding peptide
VVNNAADKYLISIPSLRA

SEQ ID NO: 9190 - protein, 17 aa, Artificial Sequence
  Cyclic GFR-binding peptide
VVKDYEDLYLMSIPELE

SEQ ID NO: 9191 - protein, 16 aa, Artificial Sequence
  Cyclic GFR-binding peptide
  MOD_RES (14), (15): Xaa is C or S
LYLISIPELDQSVXXP

SEQ ID NO: 9192 - protein, 14 aa, Artificial Sequence
  Cyclic GFR-binding peptide
  MOD_RES (14), (14): Xaa is C or S
IYLVSIPSLKTPAX

SEQ ID NO: 9193 - protein, 16 aa, Artificial Sequence
  Cyclic GFR-binding peptide
  MOD_RES (14), (15): Xaa is C or S
LYLISIPELAQPVXXP

SEQ ID NO: 9194 - protein, 20 aa, Artificial Sequence
  Cyclic GFR-binding peptide
  MOD_RES (14), (15): Xaa is C or S
LYLISIPELDQPVXXPSASA

SEQ ID NO: 9195 - protein, 22 aa, Artificial Sequence
  Cyclic GFR-binding peptide
  MOD_RES (16), (17): Xaa is C or S
KDKYLISIPSLKTPVXXAKSAK

SEQ ID NO: 9196 - protein, 14 aa, Artificial Sequence
  Cyclic GFR-binding peptide
  MOD_RES (14), (14): Xaa is C or S
LYLVSIPELKTPVX

SEQ ID NO: 9197 - protein, 19 aa, Artificial Sequence
  Cyclic GFR-binding peptide
VVKENEDIYLMSIPSLETP

SEQ ID NO: 9198 - protein, 16 aa, Artificial Sequence
  Cyclic GFR-binding peptide
  MOD_RES (14), (15): Xaa is C or S
LYLVSIPELKTPAXXA

SEQ ID NO: 9199 - protein, 17 aa, Artificial Sequence
  Cyclic GFR-binding peptide
  MOD_RES (14), (15): Xaa is C or S
IYLVSIPSLKTPAXXAK

SEQ ID NO: 9200 - protein, 24 aa, Artificial Sequence
  Cyclic GFR-binding peptide
  MOD_RES (18), (19): Xaa is C or S
ENEDIYLMSIPSLETPVXXAKPIK

SEQ ID NO: 9201 - protein, 13 aa, Artificial Sequence
  Cyclic GFR-binding peptide
IYLISIPSLAQPV

SEQ ID NO: 9202 - protein, 15 aa, Artificial Sequence
  Cyclic GFR-binding peptide
  MOD_RES (14), (15): Xaa is C or S
IYLVSIPSLQTPAXX

SEQ ID NO: 9203 - protein, 17 aa, Artificial Sequence
  Cyclic GFR-binding peptide
VVNNAADLYLISIPELR

SEQ ID NO: 9204 - protein, 16 aa, Artificial Sequence
  Cyclic GFR-binding peptide
YTVVGKDFYLISIANL

SEQ ID NO: 9205 - protein, 27 aa, Artificial Sequence
  Cyclic GFR-binding peptide
  MOD_RES (21), (22): Xaa is C or S
IVNSSDDIYLVSIPSLKTPAXXPKPVY

SEQ ID NO: 9206 - protein, 21 aa, Artificial Sequence
  Cyclic GFR-binding peptide
  MOD_RES (15), (16): Xaa is C or S
VLYLISIPELAQPVXXPAASA

SEQ ID NO: 9207 - protein, 15 aa, Artificial Sequence
  Cyclic GFR-binding peptide
  MOD_RES (14), (15): Xaa is C or S
LYLISIPELDQSVXX

SEQ ID NO: 9208 - protein, 18 aa, Artificial Sequence
  Cyclic GFR-binding peptide
  MOD_RES (14), (15): Xaa is C or S
LYLISIPELRAPVXXSAP

SEQ ID NO: 9209 - protein, 19 aa, Artificial Sequence
  Cyclic GFR-binding peptide
  MOD_RES (14), (14): Xaa is C or S
IYLVSIPSLKTPAXTPKTV

SEQ ID NO: 9210 - protein, 22 aa, Artificial Sequence
  Cyclic GFR-binding peptide
  MOD_RES (16), (17): Xaa is C or S
KDFYLISIANLKTPVXXAKSAK

SEQ ID NO: 9211 - protein, 18 aa, Artificial Sequence
  Cyclic GFR-binding peptide
  MOD_RES (14), (15): Xaa is C or S
IYLVSIPSLKTPAXXAKP

SEQ ID NO: 9212 - protein, 22 aa, Artificial Sequence
  Cyclic GFR-binding peptide
  MOD_RES (16), (17): Xaa is C or S
GILYLISIPELDQSVXXPSASA

SEQ ID NO: 9213 - protein, 18 aa, Artificial Sequence
  Cyclic GFR-binding peptide
VVNNAADFYLISIANLRA

SEQ ID NO: 9214 - protein, 20 aa, Artificial Sequence
  Cyclic GFR-binding peptide
  MOD_RES (14), (15): Xaa is C or S
IYLMSIPSLETPVXXAKPIK

SEQ ID NO: 9215 - protein, 18 aa, Artificial Sequence
  Cyclic GFR-binding peptide
  MOD_RES (14), (15): Xaa is C or S
FYLISIANLKTPVXXAKS

SEQ ID NO: 9216 - protein, 27 aa, Artificial Sequence
  Cyclic GFR-binding peptide
  MOD_RES (21), (22): Xaa is C or S
IVNNSSDIYLVSIPSLKTPAXXAKPVA

SEQ ID NO: 9217 - protein, 18 aa, Artificial Sequence
  Cyclic GFR-binding peptide
TPVGMDDLYLVSIPELKT

SEQ ID NO: 9218 - protein, 15 aa, Artificial Sequence
  Cyclic GFR-binding peptide
VVNNAADLYLISIPE

SEQ ID NO: 9219 - protein, 23 aa, Artificial Sequence
  Cyclic GFR-binding peptide
  MOD_RES (17), (18): Xaa is C or S
GKDFYLISIANLKTPVXXAKSAK

SEQ ID NO: 9220 - protein, 21 aa, Artificial Sequence
  Cyclic GFR-binding peptide
  MOD_RES (15), (16): Xaa is C or S
DLYLMSIPELETPVXXAKPIK

SEQ ID NO: 9221 - protein, 19 aa, Artificial Sequence
  Cyclic GFR-binding peptide
YTVVGKDKYLISIPSLKTP

SEQ ID NO: 9222 - protein, 19 aa, Artificial Sequence
  Cyclic GFR-binding peptide
  MOD_RES (14), (15): Xaa is C or S
IYLVSIPSLKTPVXXAKGV

SEQ ID NO: 9223 - protein, 27 aa, Artificial Sequence
  Cyclic GFR-binding peptide
  MOD_RES (21), (22): Xaa is C or S
VVKENEDIYLMSIPSLETPVXXAKPIK

SEQ ID NO: 9224 - protein, 25 aa, Artificial Sequence
  Cyclic GFR-binding peptide
  MOD_RES (19), (19): Xaa is C or S
NSSDDLYLVSIPELKTPAXTPKTVH

SEQ ID NO: 9225 - protein, 19 aa, Artificial Sequence
  Cyclic GFR-binding peptide
  MOD_RES (14), (15): Xaa is C or S
LYLMSIPELETPVXXAKPI

SEQ ID NO: 9226 - protein, 20 aa, Artificial Sequence
  Cyclic GFR-binding peptide
  MOD_RES (14), (14): Xaa is C or S
IYLVSIPSLKTPAXTPKTVH

SEQ ID NO: 9227 - protein, 23 aa, Artificial Sequence
  Cyclic GFR-binding peptide
  MOD_RES (17), (18): Xaa is C or S
KGIIYLISIPSLDQSVXXPSASA

SEQ ID NO: 9228 - protein, 22 aa, Artificial Sequence
  Cyclic GFR-binding peptide
  MOD_RES (16), (17): Xaa is C or S
KDIYLISIPSLKTPVXXAKSAK

SEQ ID NO: 9229 - protein, 17 aa, Artificial Sequence
  Cyclic GFR-binding peptide
  MOD_RES (14), (15): Xaa is C or S
KYLISIPSLKTPVXXAK

SEQ ID NO: 9230 - protein, 17 aa, Artificial Sequence
  Cyclic GFR-binding peptide
  MOD_RES (14), (15): Xaa is C or S
IYLISIPSLKTPVXXAK

SEQ ID NO: 9231 - protein, 16 aa, Artificial Sequence
  Cyclic GFR-binding peptide
YTVVGKDKYLISIPSL

SEQ ID NO: 9232 - protein, 22 aa, Artificial Sequence
  Cyclic GFR-binding peptide
  MOD_RES (16), (17): Xaa is C or S
GIIYLISIPSLDQSVXXPSASA

SEQ ID NO: 9233 - protein, 22 aa, Artificial Sequence
  Cyclic GFR-binding peptide
  MOD_RES (16), (17): Xaa is C or S
SDIYLVSIPSLKTPAXXAKPVA

SEQ ID NO: 9234 - protein, 21 aa, Artificial Sequence
  Cyclic GFR-binding peptide
  MOD_RES (15), (16): Xaa is C or S
IIYLISIPSLDQSVXXPSASA

SEQ ID NO: 9235 - protein, 18 aa, Artificial Sequence
  Cyclic GFR-binding peptide
  MOD_RES (14), (15): Xaa is C or S
IYLISIPSLDQSVXXPSA

SEQ ID NO: 9236 - protein, 26 aa, Artificial Sequence
  Cyclic GFR-binding peptide
  MOD_RES (20), (21): Xaa is C or S
VNNAADFYLISIANLRAPVXXSAPAA

SEQ ID NO: 9237 - protein, 15 aa, Artificial Sequence
  Cyclic GFR-binding peptide
  MOD_RES (14), (15): Xaa is C or S
LYLVSIPELKTPAXX

SEQ ID NO: 9238 - protein, 21 aa, Artificial Sequence
  Cyclic GFR-binding peptide
  MOD_RES (15), (16): Xaa is C or S
DLYLISIPELRAPVXXSAPAA

SEQ ID NO: 9239 - protein, 15 aa, Artificial Sequence
  Cyclic GFR-binding peptide
VVKENEDLYLMSIPE

SEQ ID NO: 9240 - protein, 21 aa, Artificial Sequence
  Cyclic GFR-binding peptide
  MOD_RES (15), (16): Xaa is C or S
DIYLVSIPSLKTPVXXAKGVK

SEQ ID NO: 9241 - protein, 19 aa, Artificial Sequence
  Cyclic GFR-binding peptide
  MOD_RES (14), (15): Xaa is C or S
LYLVSIPELKTPAXXPKPV

SEQ ID NO: 9242 - protein, 26 aa, Artificial Sequence
  Cyclic GFR-binding peptide
  MOD_RES (20), (21): Xaa is C or S
VNNAADLYLISIPELRAPVXXSAPAA

SEQ ID NO: 9243 - protein, 23 aa, Artificial Sequence
  Cyclic GFR-binding peptide
  MOD_RES (17), (17): Xaa is C or S
SDDLYLVSIPELKTPAXTPKTVH

SEQ ID NO: 9244 - protein, 17 aa, Artificial Sequence
  Cyclic GFR-binding peptide
  MOD_RES (14), (15): Xaa is C or S
LYLISIPELRAPVXXSA

SEQ ID NO: 9245 - protein, 15 aa, Artificial Sequence
  Cyclic GFR-binding peptide
VKPTRGVIYLISIPS

SEQ ID NO: 9246 - protein, 18 aa, Artificial Sequence
  Cyclic GFR-binding peptide
  MOD_RES (14), (15): Xaa is C or S
IYLMSIPSLETPVXXAKP

SEQ ID NO: 9247 - protein, 19 aa, Artificial Sequence
  Cyclic GFR-binding peptide
  MOD_RES (14), (15): Xaa is C or S
LYLVSIPELKTPVXXAKGV

SEQ ID NO: 9248 - protein, 25 aa, Artificial Sequence
  Cyclic GFR-binding peptide
  MOD_RES (19), (20): Xaa is C or S
PKRGVIYLISIPSLAQPVXXPAASA

SEQ ID NO: 9249 - protein, 24 aa, Artificial Sequence
  Cyclic GFR-binding peptide
  MOD_RES (18), (19): Xaa is C or S
DYEDLYLMSIPELETPVXXAKPIS

SEQ ID NO: 9250 - protein, 24 aa, Artificial Sequence
  Cyclic GFR-binding peptide
  MOD_RES (18), (19): Xaa is C or S
VGKDIYLISIPSLKTPVXXAKSAK

SEQ ID NO: 9251 - protein, 24 aa, Artificial Sequence
  Cyclic GFR-binding peptide
  MOD_RES (18), (19): Xaa is C or S
TKGILYLISIPELDQSVXXPSASA

SEQ ID NO: 9252 - protein, 16 aa, Artificial Sequence
  Cyclic GFR-binding peptide
  MOD_RES (14), (15): Xaa is C or S
LYLISIPELDQPVXXP

SEQ ID NO: 9253 - protein, 24 aa, Artificial Sequence
  Cyclic GFR-binding peptide
  MOD_RES (18), (19): Xaa is C or S
SSDDIYLVSIPSLQTPAXXPKPVT

SEQ ID NO: 9254 - protein, 16 aa, Artificial Sequence
  Cyclic GFR-binding peptide
VKPKRGVIYLISIPSL

SEQ ID NO: 9255 - protein, 20 aa, Artificial Sequence
  Cyclic GFR-binding peptide
  MOD_RES (14), (15): Xaa is C or S
LYLISIPELDQSVXXPSASA

SEQ ID NO: 9256 - protein, 16 aa, Artificial Sequence
  Cyclic GFR-binding peptide
VKPTRGVLYLISIPEL

SEQ ID NO: 9257 - protein, 15 aa, Artificial Sequence
  Cyclic GFR-binding peptide
VVNNAADFYLISIAN

SEQ ID NO: 9258 - protein, 26 aa, Artificial Sequence
  Cyclic GFR-binding peptide
  MOD_RES (20), (21): Xaa is C or S
VNNSSDIYLVSIPSLKTPAXXAKPVA

SEQ ID NO: 9259 - protein, 13 aa, Artificial Sequence
  Cyclic GFR-binding peptide
FYLISIANLRAPV

SEQ ID NO: 9260 - protein, 20 aa, Artificial Sequence
  Cyclic GFR-binding peptide
  MOD_RES (14), (15): Xaa is C or S
LYLMSIPELETPVXXAKPIS

SEQ ID NO: 9261 - protein, 20 aa, Artificial Sequence
  Cyclic GFR-binding peptide
  MOD_RES (14), (15): Xaa is C or S
LYLISIPELRAPVXXSAPAA

SEQ ID NO: 9262 - protein, 20 aa, Artificial Sequence
  Cyclic GFR-binding peptide
  MOD_RES (14), (14): Xaa is C or S
LYLVSIPELKTPAXTPKTVH

SEQ ID NO: 9263 - protein, 15 aa, Artificial Sequence
  Cyclic GFR-binding peptide
  MOD_RES (14), (15): Xaa is C or S
KYLISIPSLRAPVXX

SEQ ID NO: 9264 - protein, 25 aa, Artificial Sequence
  Cyclic GFR-binding peptide
  MOD_RES (19), (20): Xaa is C or S
VGMDDLYLVSIPELKTPVXXAKGVK

SEQ ID NO: 9265 - protein, 15 aa, Artificial Sequence
  Cyclic GFR-binding peptide
  MOD_RES (14), (14): Xaa is C or S
LYLVSIPELKTPAXT

SEQ ID NO: 9266 - protein, 26 aa, Artificial Sequence
  Cyclic GFR-binding peptide
  MOD_RES (20), (21): Xaa is C or S
VKENEDIYLMSIPSLETPVXXAKPIK

SEQ ID NO: 9267 - protein, 23 aa, Artificial Sequence
  Cyclic GFR-binding peptide
  MOD_RES (17), (18): Xaa is C or S
AADKYLISIPSLRAPVXXSAPAA

SEQ ID NO: 9268 - protein, 25 aa, Artificial Sequence
  Cyclic GFR-binding peptide
  MOD_RES (19), (20): Xaa is C or S
NSSDDIYLVSIPSLKTPAXXPKPVY

SEQ ID NO: 9269 - protein, 19 aa, Artificial Sequence
  Cyclic GFR-binding peptide
TPVGMDDLYLVSIPELKTP

SEQ ID NO: 9270 - protein, 22 aa, Artificial Sequence
  Cyclic GFR-binding peptide
  MOD_RES (16), (17): Xaa is C or S
GVIYLISIPSLDQPVXXPSASA

SEQ ID NO: 9271 - protein, 18 aa, Artificial Sequence
  Cyclic GFR-binding peptide
  MOD_RES (14), (15): Xaa is C or S
FYLISIANLRAPVXXSAP

SEQ ID NO: 9272 - protein, 18 aa, Artificial Sequence
  Cyclic GFR-binding peptide
VVKENEDIYLMSIPSLET

SEQ ID NO: 9273 - protein, 19 aa, Artificial Sequence
  Cyclic GFR-binding peptide
VVKENEDLYLMSIPELETP

SEQ ID NO: 9274 - protein, 15 aa, Artificial Sequence
  Cyclic GFR-binding peptide
YTVVGKDIYLISIPS

SEQ ID NO: 9275 - protein, 13 aa, Artificial Sequence
  Cyclic GFR-binding peptide
LYLVSIPELKTPV

SEQ ID NO: 9276 - protein, 15 aa, Artificial Sequence
  Cyclic GFR-binding peptide
VVNNAADKYLISIPS

SEQ ID NO: 9277 - protein, 13 aa, Artificial Sequence
  Cyclic GFR-binding peptide
KYLISIPSLRAPV

SEQ ID NO: 9278 - protein, 21 aa, Artificial Sequence
  Cyclic GFR-binding peptide
  MOD_RES (15), (16): Xaa is C or S
DLYLVSIPELKTPAXXAKPVA

SEQ ID NO: 9279 - protein, 23 aa, Artificial Sequence
  Cyclic GFR-binding peptide
  MOD_RES (17), (18): Xaa is C or S
NEDLYLMSIPELETPVXXAKPIK

SEQ ID NO: 9280 - protein, 15 aa, Artificial Sequence
  Cyclic GFR-binding peptide
  MOD_RES (14), (15): Xaa is C or S
LYLVSIPELKTPVXX

SEQ ID NO: 9281 - protein, 25 aa, Artificial Sequence
  Cyclic GFR-binding peptide
  MOD_RES (19), (20): Xaa is C or S
VVGKDFYLISIANLKTPVXXAKSAK

SEQ ID NO: 9282 - protein, 17 aa, Artificial Sequence
  Cyclic GFR-binding peptide
  MOD_RES (14), (15): Xaa is C or S
IYLISIPSLAQPVXXPA

SEQ ID NO: 9283 - protein, 15 aa, Artificial Sequence
  Cyclic GFR-binding peptide
  MOD_RES (14), (15): Xaa is C or S
FYLISIANLRAPVXX

SEQ ID NO: 9284 - protein, 21 aa, Artificial Sequence
  Cyclic GFR-binding peptide
  MOD_RES (15), (16): Xaa is C or S
DLYLVSIPELKTPAXXPKPVY

SEQ ID NO: 9285 - protein, 19 aa, Artificial Sequence
  Cyclic GFR-binding peptide
IKPTKGIIYLISIPSLDQS

SEQ ID NO: 9286 - protein, 18 aa, Artificial Sequence
  Cyclic GFR-binding peptide
  MOD_RES (14), (15): Xaa is C or S
IYLVSIPSLKTPVXXAKG

SEQ ID NO: 9287 - protein, 18 aa, Artificial Sequence
  Cyclic GFR-binding peptide
TPVGMDDIYLVSIPSLKT

SEQ ID NO: 9288 - protein, 26 aa, Artificial Sequence
  Cyclic GFR-binding peptide
  MOD_RES (20), (21): Xaa is C or S
PVGMDDIYLVSIPSLKTPVXXAKGVK

SEQ ID NO: 9289 - protein, 21 aa, Artificial Sequence
  Cyclic GFR-binding peptide
  MOD_RES (15), (16): Xaa is C or S
VIYLISIPSLDQPVXXPSASA

SEQ ID NO: 9290 - protein, 18 aa, Artificial Sequence
  Cyclic GFR-binding peptide
  MOD_RES (14), (15): Xaa is C or S
IYLISIPSLDQPVXXPSA

SEQ ID NO: 9291 - protein, 16 aa, Artificial Sequence
  Cyclic GFR-binding peptide
VKPTRGVIYLISIPSL

SEQ ID NO: 9292 - protein, 17 aa, Artificial Sequence
  Cyclic GFR-binding peptide
  MOD_RES (14), (15): Xaa is C or S
IYLISIPSLDQPVXXPS

SEQ ID NO: 9293 - protein, 16 aa, Artificial Sequence
  Cyclic GFR-binding peptide
  MOD_RES (14), (15): Xaa is C or S
IYLISIPSLAQPVXXP

SEQ ID NO: 9294 - protein, 16 aa, Artificial Sequence
  Cyclic GFR-binding peptide
  MOD_RES (14), (15): Xaa is C or S
LYLVSIPELQTPAXXP

SEQ ID NO: 9295 - protein, 17 aa, Artificial Sequence
  Cyclic GFR-binding peptide
TPVGMDDLYLVSIPELK

SEQ ID NO: 9296 - protein, 24 aa, Artificial Sequence
  Cyclic GFR-binding peptide
  MOD_RES (18), (19): Xaa is C or S
KRGVIYLISIPSLAQPVXXPAASA

SEQ ID NO: 9297 - protein, 18 aa, Artificial Sequence
  Cyclic GFR-binding peptide
VVKDYEDLYLMSIPELET

SEQ ID NO: 9298 - protein, 18 aa, Artificial Sequence
  Cyclic GFR-binding peptide
IVNNSSDLYLVSIPELKT

SEQ ID NO: 9299 - protein, 27 aa, Artificial Sequence
  Cyclic GFR-binding peptide
  MOD_RES (21), (22): Xaa is C or S
IVNSSDDLYLVSIPELKTPAXXPKPVY

SEQ ID NO: 9300 - protein, 17 aa, Artificial Sequence
  Cyclic GFR-binding peptide
  MOD_RES (14), (15): Xaa is C or S
LYLVSIPELKTPAXXPK

SEQ ID NO: 9301 - protein, 15 aa, Artificial Sequence
  Cyclic GFR-binding peptide
IKPTKGIIYLISIPS

SEQ ID NO: 9302 - protein, 25 aa, Artificial Sequence
  Cyclic GFR-binding peptide
  MOD_RES (19), (20): Xaa is C or S
KENEDIYLMSIPSLETPVXXAKPIK

SEQ ID NO: 9303 - protein, 22 aa, Artificial Sequence
  Cyclic GFR-binding peptide
  MOD_RES (16), (17): Xaa is C or S
GVLYLISIPELDQPVXXPSASA

SEQ ID NO: 9304 - protein, 24 aa, Artificial Sequence
  Cyclic GFR-binding peptide
  MOD_RES (18), (19): Xaa is C or S
VGKDKYLISIPSLKTPVXXAKSAK

SEQ ID NO: 9305 - protein, 17 aa, Artificial Sequence
  Cyclic GFR-binding peptide
YTVVGKDIYLISIPSLK

SEQ ID NO: 9306 - protein, 16 aa, Artificial Sequence
  Cyclic GFR-binding peptide
VVKENEDLYLMSIPEL

SEQ ID NO: 9307 - protein, 18 aa, Artificial Sequence
  Cyclic GFR-binding peptide
  MOD_RES (14), (15): Xaa is C or S
LYLISIPELDQPVXXPSA

SEQ ID NO: 9308 - protein, 16 aa, Artificial Sequence
  Cyclic GFR-binding peptide
IVNSSDDIYLVSIPSL

SEQ ID NO: 9309 - protein, 20 aa, Artificial Sequence
  Cyclic GFR-binding peptide
  MOD_RES (14), (15): Xaa is C or S
LYLISIPELAQPVXXPAASA

SEQ ID NO: 9310 - protein, 17 aa, Artificial Sequence
  Cyclic GFR-binding peptide
VVKENEDLYLMSIPELE

SEQ ID NO: 9311 - protein, 16 aa, Artificial Sequence
  Cyclic GFR-binding peptide
YTVVGKDIYLISIPSL

SEQ ID NO: 9312 - protein, 17 aa, Artificial Sequence
  Cyclic GFR-binding peptide
IVNSSDDIYLVSIPSLK

SEQ ID NO: 9313 - protein, 17 aa, Artificial Sequence
  Cyclic GFR-binding peptide
IVNSSDDIYLVSIPSLQ

SEQ ID NO: 9314 - protein, 27 aa, Artificial Sequence
  Cyclic GFR-binding peptide
  MOD_RES (21), (22): Xaa is C or S
VKPTRGVLYLISIPELDQPVXXPSASA

SEQ ID NO: 9315 - protein, 20 aa, Artificial Sequence
  Cyclic GFR-binding peptide
  MOD_RES (14), (15): Xaa is C or S
IYLVSIPSLKTPVXXAKGVK

SEQ ID NO: 9316 - protein, 26 aa, Artificial Sequence
  Cyclic GFR-binding peptide
  MOD_RES (20), (21): Xaa is C or S
VKDYEDIYLMSIPSLETPVXXAKPIS

SEQ ID NO: 9317 - protein, 17 aa, Artificial Sequence
  Cyclic GFR-binding peptide
  MOD_RES (14), (15): Xaa is C or S
LYLMSIPELETPVXXAK

SEQ ID NO: 9318 - protein, 15 aa, Artificial Sequence
  Cyclic GFR-binding peptide
  MOD_RES (14), (14): Xaa is C or S
IYLVSIPSLKTPAXT

SEQ ID NO: 9319 - protein, 24 aa, Artificial Sequence
  Cyclic GFR-binding peptide
  MOD_RES (18), (19): Xaa is C or S
SSDDIYLVSIPSLKTPAXXPKPVY

SEQ ID NO: 9320 - protein, 15 aa, Artificial Sequence
  Cyclic GFR-binding peptide
VKPTRGVLYLISIPE

SEQ ID NO: 9321 - protein, 24 aa, Artificial Sequence
  Cyclic GFR-binding peptide
  MOD_RES (18), (19): Xaa is C or S
SSDDLYLVSIPELQTPAXXPKPVT

SEQ ID NO: 9322 - protein, 13 aa, Artificial Sequence
  Cyclic GFR-binding peptide
LYLVSIPELKTPA

SEQ ID NO: 9323 - protein, 26 aa, Artificial Sequence
  Cyclic GFR-binding peptide
  MOD_RES (20), (21): Xaa is C or S
KPKRGVIYLISIPSLAQPVXXPAASA

SEQ ID NO: 9324 - protein, 22 aa, Artificial Sequence
  Cyclic GFR-binding peptide
  MOD_RES (16), (17): Xaa is C or S
ADKYLISIPSLRAPVXXSAPAA

SEQ ID NO: 9325 - protein, 22 aa, Artificial Sequence
  Cyclic GFR-binding peptide
  MOD_RES (16), (17): Xaa is C or S
ADLYLISIPELRAPVXXSAPAA

SEQ ID NO: 9326 - protein, 16 aa, Artificial Sequence
  Cyclic GFR-binding peptide
TPVGMDDLYLVSIPEL

SEQ ID NO: 9327 - protein, 15 aa, Artificial Sequence
  Cyclic GFR-binding peptide
  MOD_RES (14), (15): Xaa is C or S
IYLMSIPSLETPVXX

SEQ ID NO: 9328 - protein, 26 aa, Artificial Sequence
  Cyclic GFR-binding peptide
  MOD_RES (20), (21): Xaa is C or S
VNNAADKYLISIPSLRAPVXXSAPAA

SEQ ID NO: 9329 - protein, 21 aa, Artificial Sequence
  Cyclic GFR-binding peptide
  MOD_RES (15), (16): Xaa is C or S
DIYLVSIPSLKTPAXXAKPVA

SEQ ID NO: 9330 - protein, 19 aa, Artificial Sequence
  Cyclic GFR-binding peptide
YTVVGKDIYLISIPSLKTP

SEQ ID NO: 9331 - protein, 26 aa, Artificial Sequence
  Cyclic GFR-binding peptide
  MOD_RES (20), (21): Xaa is C or S
VNSSDDLYLVSIPELKTPAXXPKPVY

SEQ ID NO: 9332 - protein, 14 aa, Artificial Sequence
  Cyclic GFR-binding peptide
  MOD_RES (14), (14): Xaa is C or S
IYLMSIPSLETPVX

SEQ ID NO: 9333 - protein, 16 aa, Artificial Sequence
  Cyclic GFR-binding peptide
  MOD_RES (14), (15): Xaa is C or S
IYLISIPSLDQSVXXP

SEQ ID NO: 9334 - protein, 23 aa, Artificial Sequence
  Cyclic GFR-binding peptide
  MOD_RES (17), (18): Xaa is C or S
SDDLYLVSIPELQTPAXXPKPVT

SEQ ID NO: 9335 - protein, 14 aa, Artificial Sequence
  Cyclic GFR-binding peptide
  MOD_RES (14), (14): Xaa is C or S
LYLVSIPELKTPAX

SEQ ID NO: 9336 - protein, 18 aa, Artificial Sequence
  Cyclic GFR-binding peptide
  MOD_RES (14), (15): Xaa is C or S
KYLISIPSLKTPVXXAKS

SEQ ID NO: 9337 - protein, 18 aa, Artificial Sequence
  Cyclic GFR-binding peptide
  MOD_RES (14), (15): Xaa is C or S
IYLISIPSLKTPVXXAKS

SEQ ID NO: 9338 - protein, 15 aa, Artificial Sequence
  Cyclic GFR-binding peptide
VKPKRGVIYLISIPS

SEQ ID NO: 9339 - protein, 27 aa, Artificial Sequence
  Cyclic GFR-binding peptide
  MOD_RES (21), (22): Xaa is C or S
VKPTRGVIYLISIPSLDQPVXXPSASA

SEQ ID NO: 9340 - protein, 14 aa, Artificial Sequence
  Cyclic GFR-binding peptide
  MOD_RES (14), (14): Xaa is C or S
KYLISIPSLRAPVX

SEQ ID NO: 9341 - protein, 20 aa, Artificial Sequence
  Cyclic GFR-binding peptide
  MOD_RES (14), (15): Xaa is C or S
LYLMSIPELETPVXXAKPIK

SEQ ID NO: 9342 - protein, 16 aa, Artificial Sequence
  Cyclic GFR-binding peptide
  MOD_RES (14), (15): Xaa is C or S
LYLVSIPELKTPVXXA

SEQ ID NO: 9343 - protein, 24 aa, Artificial Sequence
  Cyclic GFR-binding peptide
  MOD_RES (18), (19): Xaa is C or S
SSDDLYLVSIPELKTPAXXPKPVY

SEQ ID NO: 9344 - protein, 26 aa, Artificial Sequence
  Cyclic GFR-binding peptide
  MOD_RES (20), (21): Xaa is C or S
TVVGKDIYLISIPSLKTPVXXAKSAK

SEQ ID NO: 9345 - protein, 26 aa, Artificial Sequence
  Cyclic GFR-binding peptide
  MOD_RES (20), (21): Xaa is C or S
VKDYEDLYLMSIPELETPVXXAKPIS

SEQ ID NO: 9346 - protein, 25 aa, Artificial Sequence
  Cyclic GFR-binding peptide
  MOD_RES (19), (20): Xaa is C or S
PTKGILYLISIPELDQSVXXPSASA

SEQ ID NO: 9347 - protein, 18 aa, Artificial Sequence
  Cyclic GFR-binding peptide
  MOD_RES (14), (15): Xaa is C or S
LYLVSIPELQTPAXXPKP

SEQ ID NO: 9348 - protein, 17 aa, Artificial Sequence
  Cyclic GFR-binding peptide
  MOD_RES (14), (15): Xaa is C or S
FYLISIANLKTPVXXAK

SEQ ID NO: 9349 - protein, 20 aa, Artificial Sequence
  Cyclic GFR-binding peptide
  MOD_RES (14), (15): Xaa is C or S
KYLISIPSLRAPVXXSAPAA

SEQ ID NO: 9350 - protein, 16 aa, Artificial Sequence
  Cyclic GFR-binding peptide
VVNNAADFYLISIANL

SEQ ID NO: 9351 - protein, 16 aa, Artificial Sequence
  Cyclic GFR-binding peptide
  MOD_RES (14), (15): Xaa is C or S
LYLISIPELRAPVXXS

SEQ ID NO: 9352 - protein, 19 aa, Artificial Sequence
  Cyclic GFR-binding peptide
  MOD_RES (14), (14): Xaa is C or S
LYLVSIPELKTPAXTPKTV

SEQ ID NO: 9353 - protein, 26 aa, Artificial Sequence
  Cyclic GFR-binding peptide
  MOD_RES (20), (21): Xaa is C or S
KPKRGVLYLISIPELAQPVXXPAASA

SEQ ID NO: 9354 - protein, 15 aa, Artificial Sequence
  Cyclic GFR-binding peptide
IVNSSDDIYLVSIPS

SEQ ID NO: 9355 - protein, 17 aa, Artificial Sequence
  Cyclic GFR-binding peptide
  MOD_RES (14), (15): Xaa is C or S
IYLISIPSLDQSVXXPS

SEQ ID NO: 9356 - protein, 21 aa, Artificial Sequence
  Cyclic GFR-binding peptide
  MOD_RES (15), (16): Xaa is C or S
ILYLISIPELDQSVXXPSASA

SEQ ID NO: 9357 - protein, 21 aa, Artificial Sequence
  Cyclic GFR-binding peptide
  MOD_RES (15), (16): Xaa is C or S
VLYLISIPELDQPVXXPSASA

SEQ ID NO: 9358 - protein, 21 aa, Artificial Sequence
  Cyclic GFR-binding peptide
  MOD_RES (15), (16): Xaa is C or S
DLYLVSIPELKTPVXXAKGVK

SEQ ID NO: 9359 - protein, 16 aa, Artificial Sequence
  Cyclic GFR-binding peptide
VVNNAADKYLISIPSL

SEQ ID NO: 9360 - protein, 20 aa, Artificial Sequence
  Cyclic GFR-binding peptide
  MOD_RES (14), (15): Xaa is C or S
FYLISIANLRAPVXXSAPAA

SEQ ID NO: 9361 - protein, 26 aa, Artificial Sequence
  Cyclic GFR-binding peptide
  MOD_RES (20), (21): Xaa is C or S
KPTKGIIYLISIPSLDQSVXXPSASA

SEQ ID NO: 9362 - protein, 18 aa, Artificial Sequence
  Cyclic GFR-binding peptide
  MOD_RES (14), (15): Xaa is C or S
LYLISIPELDQSVXXPSA

SEQ ID NO: 9363 - protein, 19 aa, Artificial Sequence
  Cyclic GFR-binding peptide
  MOD_RES (14), (15): Xaa is C or S
IYLMSIPSLETPVXXAKPI

SEQ ID NO: 9364 - protein, 19 aa, Artificial Sequence
  Cyclic GFR-binding peptide
IVNNSSDLYLVSIPELKTP

SEQ ID NO: 9365 - protein, 27 aa, Artificial Sequence
  Cyclic GFR-binding peptide
  MOD_RES (21), (22): Xaa is C or S
IKPTKGILYLISIPELDQSVXXPSASA

SEQ ID NO: 9366 - protein, 17 aa, Artificial Sequence
  Cyclic GFR-binding peptide
  MOD_RES (14), (15): Xaa is C or S
KYLISIPSLRAPVXXSA

SEQ ID NO: 9367 - protein, 17 aa, Artificial Sequence
  Cyclic GFR-binding peptide
VVKENEDIYLMSIPSLE

SEQ ID NO: 9368 - protein, 16 aa, Artificial Sequence
  Cyclic GFR-binding peptide
  MOD_RES (14), (15): Xaa is C or S
IYLMSIPSLETPVXXA

SEQ ID NO: 9369 - protein, 23 aa, Artificial Sequence
  Cyclic GFR-binding peptide
  MOD_RES (17), (18): Xaa is C or S
SDDIYLVSIPSLKTPAXXPKPVY

SEQ ID NO: 9370 - protein, 15 aa, Artificial Sequence
  Cyclic GFR-binding peptide
YTVVGKDKYLISIPS

SEQ ID NO: 9371 - protein, 19 aa, Artificial Sequence
  Cyclic GFR-binding peptide
IKPTKGILYLISIPELDQS

SEQ ID NO: 9372 - protein, 18 aa, Artificial Sequence
  Cyclic GFR-binding peptide
VVKDYEDIYLMSIPSLET

SEQ ID NO: 9373 - protein, 15 aa, Artificial Sequence
  Cyclic GFR-binding peptide
VKPKRGVLYLISIPE

SEQ ID NO: 9374 - protein, 23 aa, Artificial Sequence
  Cyclic GFR-binding peptide
  MOD_RES (17), (18): Xaa is C or S
GKDIYLISIPSLKTPVXXAKSAK

SEQ ID NO: 9375 - protein, 14 aa, Artificial Sequence
  Cyclic GFR-binding peptide
  MOD_RES (14), (14): Xaa is C or S
IYLISIPSLDQSVX

SEQ ID NO: 9376 - protein, 13 aa, Artificial Sequence
  Cyclic GFR-binding peptide
IYLMSIPSLETPV

SEQ ID NO: 9377 - protein, 27 aa, Artificial Sequence
  Cyclic GFR-binding peptide
  MOD_RES (21), (22): Xaa is C or S
VVKDYEDIYLMSIPSLETPVXXAKPIS

SEQ ID NO: 9378 - protein, 26 aa, Artificial Sequence
  Cyclic GFR-binding peptide
  MOD_RES (20), (21): Xaa is C or S
VNSSDDLYLVSIPELQTPAXXPKPVT

SEQ ID NO: 9379 - protein, 21 aa, Artificial Sequence
  Cyclic GFR-binding peptide
  MOD_RES (15), (15): Xaa is C or S
DLYLVSIPELKTPAXTPKTVH

SEQ ID NO: 9380 - protein, 13 aa, Artificial Sequence
  Cyclic GFR-binding peptide
IYLVSIPSLKTPV

SEQ ID NO: 9381 - protein, 18 aa, Artificial Sequence
  Cyclic GFR-binding peptide
IVNNSSDIYLVSIPSLKT

SEQ ID NO: 9382 - protein, 17 aa, Artificial Sequence
  Cyclic GFR-binding peptide
YTVVGKDFYLISIANLK

SEQ ID NO: 9383 - protein, 19 aa, Artificial Sequence
  Cyclic GFR-binding peptide
  MOD_RES (14), (15): Xaa is C or S
IYLVSIPSLKTPAXXAKPV

SEQ ID NO: 9384 - protein, 16 aa, Artificial Sequence
  Cyclic GFR-binding peptide
  MOD_RES (14), (15): Xaa is C or S
IYLISIPSLKTPVXXA

SEQ ID NO: 9385 - protein, 18 aa, Artificial Sequence
  Cyclic GFR-binding peptide
VVKENEDLYLMSIPELET

SEQ ID NO: 9386 - protein, 16 aa, Artificial Sequence
  Cyclic GFR-binding peptide
  MOD_RES (14), (15): Xaa is C or S
KYLISIPSLKTPVXXA

SEQ ID NO: 9387 - protein, 18 aa, Artificial Sequence
  Cyclic GFR-binding peptide
YTVVGKDIYLISIPSLKT

SEQ ID NO: 9388 - protein, 23 aa, Artificial Sequence
  Cyclic GFR-binding peptide
  MOD_RES (17), (18): Xaa is C or S
SSDLYLVSIPELKTPAXXAKPVA

SEQ ID NO: 9389 - protein, 22 aa, Artificial Sequence
  Cyclic GFR-binding peptide
  MOD_RES (16), (17): Xaa is C or S
ADFYLISIANLRAPVXXSAPAA

SEQ ID NO: 9390 - protein, 13 aa, Artificial Sequence
  Cyclic GFR-binding peptide
LYLISIPELAQPV

SEQ ID NO: 9391 - protein, 15 aa, Artificial Sequence
  Cyclic GFR-binding peptide
VVKENEDIYLMSIPS

SEQ ID NO: 9392 - protein, 15 aa, Artificial Sequence
  Cyclic GFR-binding peptide
  MOD_RES (14), (15): Xaa is C or S
LYLISIPELRAPVXX

SEQ ID NO: 9393 - protein, 22 aa, Artificial Sequence
  Cyclic GFR-binding peptide
  MOD_RES (16), (17): Xaa is C or S
EDIYLMSIPSLETPVXXAKPIK

SEQ ID NO: 9394 - protein, 23 aa, Artificial Sequence
  Cyclic GFR-binding peptide
  MOD_RES (17), (18): Xaa is C or S
MDDLYLVSIPELKTPVXXAKGVK

SEQ ID NO: 9395 - protein, 26 aa, Artificial Sequence
  Cyclic GFR-binding peptide
  MOD_RES (20), (20): Xaa is C or S
VNSSDDLYLVSIPELKTPAXTPKTVH

SEQ ID NO: 9396 - protein, 18 aa, Artificial Sequence
  Cyclic GFR-binding peptide
  MOD_RES (14), (15): Xaa is C or S
LYLVSIPELKTPAXXAKP

SEQ ID NO: 9397 - protein, 19 aa, Artificial Sequence
  Cyclic GFR-binding peptide
  MOD_RES (14), (15): Xaa is C or S
KYLISIPSLKTPVXXAKSA

SEQ ID NO: 9398 - protein, 26 aa, Artificial Sequence
  Cyclic GFR-binding peptide
  MOD_RES (20), (21): Xaa is C or S
PVGMDDLYLVSIPELKTPVXXAKGVK

SEQ ID NO: 9399 - protein, 19 aa, Artificial Sequence
  Cyclic GFR-binding peptide
  MOD_RES (14), (15): Xaa is C or S
IYLISIPSLKTPVXXAKSA

SEQ ID NO: 9400 - protein, 27 aa, Artificial Sequence
  Cyclic GFR-binding peptide
  MOD_RES (21), (22): Xaa is C or S
YTVVGKDIYLISIPSLKTPVXXAKSAK

SEQ ID NO: 9401 - protein, 16 aa, Artificial Sequence
  Cyclic GFR-binding peptide
  MOD_RES (14), (15): Xaa is C or S
IYLVSIPSLKTPAXXA

SEQ ID NO: 9402 - protein, 25 aa, Artificial Sequence
  Cyclic GFR-binding peptide
  MOD_RES (19), (20): Xaa is C or S
NNAADKYLISIPSLRAPVXXSAPAA

SEQ ID NO: 9403 - protein, 23 aa, Artificial Sequence
  Cyclic GFR-binding peptide
  MOD_RES (17), (18): Xaa is C or S
RGVLYLISIPELAQPVXXPAASA

SEQ ID NO: 9404 - protein, 17 aa, Artificial Sequence
  Cyclic GFR-binding peptide
VKPKRGVIYLISIPSLA

SEQ ID NO: 9405 - protein, 18 aa, Artificial Sequence
  Cyclic GFR-binding peptide
VKPTRGVLYLISIPELDQ

SEQ ID NO: 9406 - protein, 27 aa, Artificial Sequence
  Cyclic GFR-binding peptide
  MOD_RES (21), (22): Xaa is C or S
IVNNSSDLYLVSIPELKTPAXXAKPVA

SEQ ID NO: 9407 - protein, 16 aa, Artificial Sequence
  Cyclic GFR-binding peptide
  MOD_RES (14), (15): Xaa is C or S
IYLISIPSLDQPVXXP

SEQ ID NO: 9408 - protein, 16 aa, Artificial Sequence
  Cyclic GFR-binding peptide
TPVGMDDIYLVSIPSL

SEQ ID NO: 9409 - protein, 15 aa, Artificial Sequence
  Cyclic GFR-binding peptide
  MOD_RES (14), (15): Xaa is C or S
IYLISIPSLDQSVXX

SEQ ID NO: 9410 - protein, 18 aa, Artificial Sequence
  Cyclic GFR-binding peptide
  MOD_RES (14), (15): Xaa is C or S
KYLISIPSLRAPVXXSAP

SEQ ID NO: 9411 - protein, 15 aa, Artificial Sequence
  Cyclic GFR-binding peptide
IKPTKGILYLISIPE

SEQ ID NO: 9412 - protein, 25 aa, Artificial Sequence
  Cyclic GFR-binding peptide
  MOD_RES (19), (20): Xaa is C or S
NSSDDIYLVSIPSLQTPAXXPKPVT

SEQ ID NO: 9413 - protein, 17 aa, Artificial Sequence
  Cyclic GFR-binding peptide
  MOD_RES (14), (14): Xaa is C or S
IYLVSIPSLKTPAXTPK

SEQ ID NO: 9414 - protein, 26 aa, Artificial Sequence
  Cyclic GFR-binding peptide
  MOD_RES (20), (20): Xaa is C or S
VNSSDDIYLVSIPSLKTPAXTPKTVH

SEQ ID NO: 9415 - protein, 27 aa, Artificial Sequence
  Cyclic GFR-binding peptide
  MOD_RES (21), (22): Xaa is C or S
VKPKRGVIYLISIPSLAQPVXXPAASA

SEQ ID NO: 9416 - protein, 25 aa, Artificial Sequence
  Cyclic GFR-binding peptide
  MOD_RES (19), (20): Xaa is C or S
VVGKDIYLISIPSLKTPVXXAKSAK

SEQ ID NO: 9417 - protein, 19 aa, Artificial Sequence
  Cyclic GFR-binding peptide
TPVGMDDIYLVSIPSLKTP

SEQ ID NO: 9418 - protein, 20 aa, Artificial Sequence
  Cyclic GFR-binding peptide
  MOD_RES (14), (15): Xaa is C or S
LYLVSIPELKTPAXXAKPVA

SEQ ID NO: 9419 - protein, 15 aa, Artificial Sequence
  Cyclic GFR-binding peptide
  MOD_RES (14), (15): Xaa is C or S
IYLISIPSLAQPVXX

SEQ ID NO: 9420 - protein, 23 aa, Artificial Sequence
  Cyclic GFR-binding peptide
  MOD_RES (17), (18): Xaa is C or S
RGVIYLISIPSLDQPVXXPSASA

SEQ ID NO: 9421 - protein, 21 aa, Artificial Sequence
  Cyclic GFR-binding peptide
  MOD_RES (15), (16): Xaa is C or S
DLYLMSIPELETPVXXAKPIS

SEQ ID NO: 9422 - protein, 26 aa, Artificial Sequence
  Cyclic GFR-binding peptide
  MOD_RES (20), (21): Xaa is C or S
VKENEDLYLMSIPELETPVXXAKPIK

SEQ ID NO: 9423 - protein, 18 aa, Artificial Sequence
  Cyclic GFR-binding peptide
IVNSSDDLYLVSIPELKT

SEQ ID NO: 9424 - protein, 14 aa, Artificial Sequence
  Cyclic GFR-binding peptide
  MOD_RES (14), (14): Xaa is C or S
LYLISIPELRAPVX

SEQ ID NO: 9425 - protein, 18 aa, Artificial Sequence
  Cyclic GFR-binding peptide
  MOD_RES (14), (15): Xaa is C or S
IYLISIPSLAQPVXXPAA

SEQ ID NO: 9426 - protein, 18 aa, Artificial Sequence
  Cyclic GFR-binding peptide
IVNSSDDLYLVSIPELQT

SEQ ID NO: 9427 - protein, 26 aa, Artificial Sequence
  Cyclic GFR-binding peptide
  MOD_RES (20), (21): Xaa is C or S
TVVGKDFYLISIANLKTPVXXAKSAK

SEQ ID NO: 9428 - protein, 23 aa, Artificial Sequence
  Cyclic GFR-binding peptide
  MOD_RES (17), (18): Xaa is C or S
AADFYLISIANLRAPVXXSAPAA

SEQ ID NO: 9429 - protein, 18 aa, Artificial Sequence
  Cyclic GFR-binding peptide
  MOD_RES (14), (15): Xaa is C or S
IYLVSIPSLQTPAXXPKP

SEQ ID NO: 9430 - protein, 13 aa, Artificial Sequence
  Cyclic GFR-binding peptide
IYLVSIPSLQTPA

SEQ ID NO: 9431 - protein, 21 aa, Artificial Sequence
  Cyclic GFR-binding peptide
  MOD_RES (15), (16): Xaa is C or S
DLYLVSIPELQTPAXXPKPVT

SEQ ID NO: 9432 - protein, 13 aa, Artificial Sequence
  Cyclic GFR-binding peptide
IYLISIPSLKTPV

SEQ ID NO: 9433 - protein, 13 aa, Artificial Sequence
  Cyclic GFR-binding peptide
KYLISIPSLKTPV

SEQ ID NO: 9434 - protein, 27 aa, Artificial Sequence
  Cyclic GFR-binding peptide
  MOD_RES (21), (22): Xaa is C or S
YTVVGKDFYLISIANLKTPVXXAKSAK

SEQ ID NO: 9435 - protein, 24 aa, Artificial Sequence
  Cyclic GFR-binding peptide
  MOD_RES (18), (19): Xaa is C or S
VGKDFYLISIANLKTPVXXAKSAK

SEQ ID NO: 9436 - protein, 23 aa, Artificial Sequence
  Cyclic GFR-binding peptide
  MOD_RES (17), (18): Xaa is C or S
YEDIYLMSIPSLETPVXXAKPIS

SEQ ID NO: 9437 - protein, 14 aa, Artificial Sequence
  Cyclic GFR-binding peptide
  MOD_RES (14), (14): Xaa is C or S
IYLISIPSLDQPVX

SEQ ID NO: 9438 - protein, 13 aa, Artificial Sequence
  Cyclic GFR-binding peptide
LYLISIPELDQSV

SEQ ID NO: 9439 - protein, 27 aa, Artificial Sequence
  Cyclic GFR-binding peptide
  MOD_RES (21), (22): Xaa is C or S
IVNSSDDIYLVSIPSLQTPAXXPKPVT

SEQ ID NO: 9440 - protein, 18 aa, Artificial Sequence
  Cyclic GFR-binding peptide
  MOD_RES (14), (14): Xaa is C or S
IYLVSIPSLKTPAXTPKT

SEQ ID NO: 9441 - protein, 17 aa, Artificial Sequence
  Cyclic GFR-binding peptide
VVKDYEDIYLMSIPSLE

SEQ ID NO: 9442 - protein, 19 aa, Artificial Sequence
  Cyclic GFR-binding peptide
VKPKRGVIYLISIPSLAQP

SEQ ID NO: 9443 - protein, 15 aa, Artificial Sequence
  Cyclic GFR-binding peptide
  MOD_RES (14), (15): Xaa is C or S
IYLISIPSLDQPVXX

SEQ ID NO: 9444 - protein, 20 aa, Artificial Sequence
  Cyclic GFR-binding peptide
  MOD_RES (14), (15): Xaa is C or S
IYLISIPSLAQPVXXPAASA

SEQ ID NO: 9445 - protein, 16 aa, Artificial Sequence
  Cyclic GFR-binding peptide
VVKDYEDLYLMSIPEL

SEQ ID NO: 9446 - protein, 16 aa, Artificial Sequence
  Cyclic GFR-binding peptide
  MOD_RES (14), (15): Xaa is C or S
IYLVSIPSLKTPVXXA

SEQ ID NO: 9447 - protein, 18 aa, Artificial Sequence
  Cyclic GFR-binding peptide
IKPTKGILYLISIPELDQ

SEQ ID NO: 9448 - protein, 19 aa, Artificial Sequence
  Cyclic GFR-binding peptide
  MOD_RES (14), (15): Xaa is C or S
LYLISIPELDQSVXXPSAS

SEQ ID NO: 9449 - protein, 17 aa, Artificial Sequence
  Cyclic GFR-binding peptide
  MOD_RES (14), (15): Xaa is C or S
IYLVSIPSLKTPAXXPK

SEQ ID NO: 9450 - protein, 25 aa, Artificial Sequence
  Cyclic GFR-binding peptide
  MOD_RES (19), (20): Xaa is C or S
NSSDDLYLVSIPELQTPAXXPKPVT

SEQ ID NO: 9451 - protein, 21 aa, Artificial Sequence
  Cyclic GFR-binding peptide
  MOD_RES (15), (16): Xaa is C or S
DIYLVSIPSLKTPAXXPKPVY

SEQ ID NO: 9452 - protein, 17 aa, Artificial Sequence
  Cyclic GFR-binding peptide
  MOD_RES (14), (15): Xaa is C or S
IYLVSIPSLQTPAXXPK

SEQ ID NO: 9453 - protein, 23 aa, Artificial Sequence
  Cyclic GFR-binding peptide
  MOD_RES (17), (18): Xaa is C or S
SDDIYLVSIPSLQTPAXXPKPVT

SEQ ID NO: 9454 - protein, 14 aa, Artificial Sequence
  Cyclic GFR-binding peptide
  MOD_RES (14), (14): Xaa is C or S
FYLISIANLRAPVX

SEQ ID NO: 9455 - protein, 25 aa, Artificial Sequence
  Cyclic GFR-binding peptide
  MOD_RES (19), (20): Xaa is C or S
NNAADFYLISIANLRAPVXXSAPAA

SEQ ID NO: 9456 - protein, 14 aa, Artificial Sequence
  Cyclic GFR-binding peptide
  MOD_RES (14), (14): Xaa is C or S
IYLISIPSLAQPVX

SEQ ID NO: 9457 - protein, 27 aa, Artificial Sequence
  Cyclic GFR-binding peptide
  MOD_RES (21), (22): Xaa is C or S
YTVVGKDKYLISIPSLKTPVXXAKSAK

SEQ ID NO: 9458 - protein, 27 aa, Artificial Sequence
  Cyclic GFR-binding peptide
  MOD_RES (21), (22): Xaa is C or S
TPVGMDDIYLVSIPSLKTPVXXAKGVK

SEQ ID NO: 9459 - protein, 18 aa, Artificial Sequence
  Cyclic GFR-binding peptide
  MOD_RES (14), (15): Xaa is C or S
IYLVSIPSLKTPAXXPKP

SEQ ID NO: 9460 - protein, 19 aa, Artificial Sequence
  Cyclic GFR-binding peptide
VVKDYEDLYLMSIPELETP

SEQ ID NO: 9461 - protein, 25 aa, Artificial Sequence
  Cyclic GFR-binding peptide
  MOD_RES (19), (20): Xaa is C or S
KDYEDLYLMSIPELETPVXXAKPIS

SEQ ID NO: 9462 - protein, 16 aa, Artificial Sequence
  Cyclic GFR-binding peptide
IKPTKGIIYLISIPSL

SEQ ID NO: 9463 - protein, 13 aa, Artificial Sequence
  Cyclic GFR-binding peptide
IYLVSIPSLKTPA

SEQ ID NO: 9464 - protein, 24 aa, Artificial Sequence
  Cyclic GFR-binding peptide
  MOD_RES (18), (19): Xaa is C or S
TKGIIYLISIPSLDQSVXXPSASA

SEQ ID NO: 9465 - protein, 17 aa, Artificial Sequence
  Cyclic GFR-binding peptide
YTVVGKDKYLISIPSLK

SEQ ID NO: 9466 - protein, 15 aa, Artificial Sequence
  Cyclic GFR-binding peptide
TPVGMDDLYLVSIPE

SEQ ID NO: 9467 - protein, 20 aa, Artificial Sequence
  Cyclic GFR-binding peptide
  MOD_RES (14), (15): Xaa is C or S
LYLVSIPELKTPAXXPKPVY

SEQ ID NO: 9468 - protein, 26 aa, Artificial Sequence
  Cyclic GFR-binding peptide
  MOD_RES (20), (21): Xaa is C or S
KPTRGVIYLISIPSLDQPVXXPSASA

SEQ ID NO: 9469 - protein, 23 aa, Artificial Sequence
  Cyclic GFR-binding peptide
  MOD_RES (6), (7): Xaa is C or S
ASASPXXVPQDLEPISILYLVGR

SEQ ID NO: 9470 - protein, 13 aa, Artificial Sequence
  Cyclic GFR-binding peptide
VPQDLEPISILYL

SEQ ID NO: 9471 - protein, 14 aa, Artificial Sequence
  Cyclic GFR-binding peptide
  MOD_RES (1), (1): Xaa is C or S
XVPTKLNAISILYF

SEQ ID NO: 9472 - protein, 13 aa, Artificial Sequence
  Cyclic GFR-binding peptide
VPTELEPISMLYL

SEQ ID NO: 9473 - protein, 19 aa, Artificial Sequence
  Cyclic GFR-binding peptide
  MOD_RES (5), (6): Xaa is C or S
APASXXVPARLSPISILYK

SEQ ID NO: 9474 - protein, 14 aa, Artificial Sequence
  Cyclic GFR-binding peptide
  MOD_RES (1), (1): Xaa is C or S
XVSQDLEPISILYL

SEQ ID NO: 9475 - protein, 17 aa, Artificial Sequence
  Cyclic GFR-binding peptide
RLSPISILYKDAANNVV

SEQ ID NO: 9476 - protein, 19 aa, Artificial Sequence
  Cyclic GFR-binding peptide
PARLSPISILYKDAANNVV

SEQ ID NO: 9477 - protein, 26 aa, Artificial Sequence
  Cyclic GFR-binding peptide
  MOD_RES (6), (7): Xaa is C or S
TVPKPXXAPTQLSPISVLYIDDSSNV

SEQ ID NO: 9478 - protein, 21 aa, Artificial Sequence
  Cyclic GFR-binding peptide
  MOD_RES (6), (7): Xaa is C or S
KASKAXXVPTKLSPISILYKD

SEQ ID NO: 9479 - protein, 16 aa, Artificial Sequence
  Cyclic GFR-binding peptide
  MOD_RES (3), (3): Xaa is C or S
PTXAPTKLEPISVLYL

SEQ ID NO: 9480 - protein, 19 aa, Artificial Sequence
  Cyclic GFR-binding peptide
PTKLEPISVLYLDDSSNVI

SEQ ID NO: 9481 - protein, 14 aa, Artificial Sequence
  Cyclic GFR-binding peptide
  MOD_RES (1), (1): Xaa is C or S
XVPTKLSPISILYI

SEQ ID NO: 9482 - protein, 14 aa, Artificial Sequence
  Cyclic GFR-binding peptide
  MOD_RES (1), (1): Xaa is C or S
XVPTKLSPISILYK

SEQ ID NO: 9483 - protein, 18 aa, Artificial Sequence
  Cyclic GFR-binding peptide
ARLEPISILYLDAANNVV

SEQ ID NO: 9484 - protein, 24 aa, Artificial Sequence
  Cyclic GFR-binding peptide
  MOD_RES (6), (7): Xaa is C or S
KIPKAXXVPTELEPISMLYLDENE

SEQ ID NO: 9485 - protein, 18 aa, Artificial Sequence
  Cyclic GFR-binding peptide
TKLNAISILYFDKGVVTY

SEQ ID NO: 9486 - protein, 22 aa, Artificial Sequence
  Cyclic GFR-binding peptide
  MOD_RES (6), (7): Xaa is C or S
AVPKAXXAPTKLEPISVLYLDS

SEQ ID NO: 9487 - protein, 22 aa, Artificial Sequence
  Cyclic GFR-binding peptide
  MOD_RES (6), (7): Xaa is C or S
KVGKAXXVPTKLEPISVLYLDD

SEQ ID NO: 9488 - protein, 19 aa, Artificial Sequence
  Cyclic GFR-binding peptide
PQDLEPISILYLVGRTPKV

SEQ ID NO: 9489 - protein, 17 aa, Artificial Sequence
  Cyclic GFR-binding peptide
  MOD_RES (3), (4): Xaa is C or S
SPXXVSQDLEPISILYL

SEQ ID NO: 9490 - protein, 25 aa, Artificial Sequence
  Cyclic GFR-binding peptide
  MOD_RES (6), (7): Xaa is C or S
SIPKAXXVPTELSPISMLYIDEYDK

SEQ ID NO: 9491 - protein, 26 aa, Artificial Sequence
  Cyclic GFR-binding peptide
  MOD_RES (6), (7): Xaa is C or S
ASASPXXVPQDLEPISILYLVGRTPK

SEQ ID NO: 9492 - protein, 16 aa, Artificial Sequence
  Cyclic GFR-binding peptide
  MOD_RES (2), (3): Xaa is C or S
SXXVPARLNAISILYF

SEQ ID NO: 9493 - protein, 25 aa, Artificial Sequence
  Cyclic GFR-binding peptide
  MOD_RES (6), (7): Xaa is C or S
KIPKAXXVPTELEPISMLYLDENEK

SEQ ID NO: 9494 - protein, 22 aa, Artificial Sequence
  Cyclic GFR-binding peptide
  MOD_RES (6), (7): Xaa is C or S
SIPKAXXVPTELEPISMLYLDE

SEQ ID NO: 9495 - protein, 19 aa, Artificial Sequence
  Cyclic GFR-binding peptide
  MOD_RES (5), (6): Xaa is C or S
APASXXVPARLNAISILYF

SEQ ID NO: 9496 - protein, 17 aa, Artificial Sequence
  Cyclic GFR-binding peptide
  MOD_RES (4), (4): Xaa is C or S
KPTXAPTKLEPISVLYL

SEQ ID NO: 9497 - protein, 18 aa, Artificial Sequence
  Cyclic GFR-binding peptide
TQLSPISVLYIDDSSNVI

SEQ ID NO: 9498 - protein, 18 aa, Artificial Sequence
  Cyclic GFR-binding peptide
TKLSPISVLYIDDSSNVI

SEQ ID NO: 9499 - protein, 17 aa, Artificial Sequence
  Cyclic GFR-binding peptide
ALEPISILYLVGRKPKV

SEQ ID NO: 9500 - protein, 16 aa, Artificial Sequence
  Cyclic GFR-binding peptide
  MOD_RES (2), (3): Xaa is C or S
SXXVPARLSPISILYK

SEQ ID NO: 9501 - protein, 17 aa, Artificial Sequence
  Cyclic GFR-binding peptide
  MOD_RES (3), (4): Xaa is C or S
KAXXAPTKLEPISVLYL

SEQ ID NO: 9502 - protein, 23 aa, Artificial Sequence
  Cyclic GFR-binding peptide
  MOD_RES (6), (7): Xaa is C or S
KVGKAXXVPTKLSPISVLYIDDM

SEQ ID NO: 9503 - protein, 24 aa, Artificial Sequence
  Cyclic GFR-binding peptide
  MOD_RES (6), (7): Xaa is C or S
AAPASXXVPARLNAISILYFDAAN

SEQ ID NO: 9504 - protein, 15 aa, Artificial Sequence
  Cyclic GFR-binding peptide
EPISVLYLDDSSNVI

SEQ ID NO: 9505 - protein, 15 aa, Artificial Sequence
  Cyclic GFR-binding peptide
  MOD_RES (1), (2): Xaa is C or S
XXVPTELEPISMLYL

SEQ ID NO: 9506 - protein, 17 aa, Artificial Sequence
  Cyclic GFR-binding peptide
DLEPISILYLVGRTPKV

SEQ ID NO: 9507 - protein, 19 aa, Artificial Sequence
  Cyclic GFR-binding peptide
PARLNAISILYFDAANNVV

SEQ ID NO: 9508 - protein, 24 aa, Artificial Sequence
  Cyclic GFR-binding peptide
  MOD_RES (6), (7): Xaa is C or S
KVGKAXXVPTKLEPISVLYLDDMG

SEQ ID NO: 9509 - protein, 25 aa, Artificial Sequence
  Cyclic GFR-binding peptide
  MOD_RES (6), (7): Xaa is C or S
ASAAPXXVPQALEPISILYLVGRKP

SEQ ID NO: 9510 - protein, 15 aa, Artificial Sequence
  Cyclic GFR-binding peptide
  MOD_RES (1), (2): Xaa is C or S
XXVPQDLEPISILYL

SEQ ID NO: 9511 - protein, 18 aa, Artificial Sequence
  Cyclic GFR-binding peptide
QALSPISILYIVGRKPKV

SEQ ID NO: 9512 - protein, 14 aa, Artificial Sequence
  Cyclic GFR-binding peptide
  MOD_RES (1), (1): Xaa is C or S
XAPTQLEPISVLYL

SEQ ID NO: 9513 - protein, 17 aa, Artificial Sequence
  Cyclic GFR-binding peptide
DLSPISILYIIGKTPKI

SEQ ID NO: 9514 - protein, 26 aa, Artificial Sequence
  Cyclic GFR-binding peptide
  MOD_RES (6), (7): Xaa is C or S
ASASPXXVSQDLEPISILYLIGKTPK

SEQ ID NO: 9515 - protein, 17 aa, Artificial Sequence
  Cyclic GFR-binding peptide
RLNAISILYFDAANNVV

SEQ ID NO: 9516 - protein, 21 aa, Artificial Sequence
  Cyclic GFR-binding peptide
  MOD_RES (6), (7): Xaa is C or S
KIPKAXXVPTELSPISMLYID

SEQ ID NO: 9517 - protein, 22 aa, Artificial Sequence
  Cyclic GFR-binding peptide
  MOD_RES (6), (7): Xaa is C or S
KVGKAXXVPTKLSPISVLYIDD

SEQ ID NO: 9518 - protein, 19 aa, Artificial Sequence
  Cyclic GFR-binding peptide
  MOD_RES (5), (6): Xaa is C or S
SAAPXXVPQALEPISILYL

SEQ ID NO: 9519 - protein, 27 aa, Artificial Sequence
  Cyclic GFR-binding peptide
  MOD_RES (6), (7): Xaa is C or S
ASASPXXVSQDLSPISILYIIGKTPKI

SEQ ID NO: 9520 - protein, 17 aa, Artificial Sequence
  Cyclic GFR-binding peptide
KLEPISVLYLDSSNNVI

SEQ ID NO: 9521 - protein, 27 aa, Artificial Sequence
  Cyclic GFR-binding peptide
  MOD_RES (7), (7): Xaa is C or S
HVTKPTXAPTKLSPISVLYIDDSSNVI

SEQ ID NO: 9522 - protein, 24 aa, Artificial Sequence
  Cyclic GFR-binding peptide
  MOD_RES (7), (7): Xaa is C or S
HVTKPTXAPTKLSPISVLYIDDSS

SEQ ID NO: 9523 - protein, 23 aa, Artificial Sequence
  Cyclic GFR-binding peptide
  MOD_RES (6), (7): Xaa is C or S
KIPKAXXVPTELSPISMLYIDEN

SEQ ID NO: 9524 - protein, 27 aa, Artificial Sequence
  Cyclic GFR-binding peptide
  MOD_RES (6), (7): Xaa is C or S
KIPKAXXVPTELEPISMLYLDENEKVV

SEQ ID NO: 9525 - protein, 16 aa, Artificial Sequence
  Cyclic GFR-binding peptide
LEPISVLYLDSSNNVI

SEQ ID NO: 9526 - protein, 19 aa, Artificial Sequence
  Cyclic GFR-binding peptide
PTKLNAISILYFDKGVVTY

SEQ ID NO: 9527 - protein, 16 aa, Artificial Sequence
  Cyclic GFR-binding peptide
  MOD_RES (2), (3): Xaa is C or S
PXXAPTKLEPISVLYL

SEQ ID NO: 9528 - protein, 21 aa, Artificial Sequence
  Cyclic GFR-binding peptide
  MOD_RES (7), (7): Xaa is C or S
HVTKPTXAPTKLSPISVLYID

SEQ ID NO: 9529 - protein, 17 aa, Artificial Sequence
  Cyclic GFR-binding peptide
  MOD_RES (3), (4): Xaa is C or S
KAXXVPTELSPISMLYI

SEQ ID NO: 9530 - protein, 15 aa, Artificial Sequence
  Cyclic GFR-binding peptide
SPISVLYIDSSNNVI

SEQ ID NO: 9531 - protein, 19 aa, Artificial Sequence
  Cyclic GFR-binding peptide
PTELSPISMLYIDEYDKVV

SEQ ID NO: 9532 - protein, 27 aa, Artificial Sequence
  Cyclic GFR-binding peptide
  MOD_RES (6), (7): Xaa is C or S
AAPASXXVPARLEPISILYLDAANNVV

SEQ ID NO: 9533 - protein, 19 aa, Artificial Sequence
  Cyclic GFR-binding peptide
PARLEPISILYLDAANNVV

SEQ ID NO: 9534 - protein, 24 aa, Artificial Sequence
  Cyclic GFR-binding peptide
  MOD_RES (6), (7): Xaa is C or S
ASASPXXVPQDLEPISILYLVGRT

SEQ ID NO: 9535 - protein, 19 aa, Artificial Sequence
  Cyclic GFR-binding peptide
PQALEPISILYLVGRKPKV

SEQ ID NO: 9536 - protein, 19 aa, Artificial Sequence
  Cyclic GFR-binding peptide
  MOD_RES (5), (6): Xaa is C or S
SASPXXVPQDLEPISILYL

SEQ ID NO: 9537 - protein, 20 aa, Artificial Sequence
  Cyclic GFR-binding peptide
  MOD_RES (6), (7): Xaa is C or S
KVGKAXXVPTKLEPISVLYL

SEQ ID NO: 9538 - protein, 20 aa, Artificial Sequence
  Cyclic GFR-binding peptide
  MOD_RES (6), (7): Xaa is C or S
TVPKPXXAPTQLSPISVLYI

SEQ ID NO: 9539 - protein, 17 aa, Artificial Sequence
  Cyclic GFR-binding peptide
  MOD_RES (3), (4): Xaa is C or S
APXXVPQALEPISILYL

SEQ ID NO: 9540 - protein, 14 aa, Artificial Sequence
  Cyclic GFR-binding peptide
  MOD_RES (1), (1): Xaa is C or S
XVPTKLSPISVLYI

SEQ ID NO: 9541 - protein, 24 aa, Artificial Sequence
  Cyclic GFR-binding peptide
  MOD_RES (6), (7): Xaa is C or S
AAPASXXVPARLSPISILYKDAAN

SEQ ID NO: 9542 - protein, 23 aa, Artificial Sequence
  Cyclic GFR-binding peptide
  MOD_RES (6), (7): Xaa is C or S
KASKAXXVPTKLSPISILYKDKG

SEQ ID NO: 9543 - protein, 24 aa, Artificial Sequence
  Cyclic GFR-binding peptide
  MOD_RES (6), (7): Xaa is C or S
AAPASXXVPARLEPISILYLDAAN

SEQ ID NO: 9544 - protein, 21 aa, Artificial Sequence
  Cyclic GFR-binding peptide
  MOD_RES (6), (7): Xaa is C or S
KASKAXXVPTKLNAISILYFD

SEQ ID NO: 9545 - protein, 27 aa, Artificial Sequence
  Cyclic GFR-binding peptide
  MOD_RES (7), (7): Xaa is C or S
HVTKPTXAPTKLEPISVLYLDDSSNVI

SEQ ID NO: 9546 - protein, 20 aa, Artificial Sequence
  Cyclic GFR-binding peptide
  MOD_RES (6), (7): Xaa is C or S
AVPKAXXAPTKLSPISVLYI

SEQ ID NO: 9547 - protein, 17 aa, Artificial Sequence
  Cyclic GFR-binding peptide
KLEPISVLYLDDSSNVI

SEQ ID NO: 9548 - protein, 17 aa, Artificial Sequence
  Cyclic GFR-binding peptide
QLEPISVLYLDDSSNVI

SEQ ID NO: 9549 - protein, 20 aa, Artificial Sequence
  Cyclic GFR-binding peptide
  MOD_RES (6), (7): Xaa is C or S
TVPKPXXAPTQLEPISVLYL

SEQ ID NO: 9550 - protein, 19 aa, Artificial Sequence
  Cyclic GFR-binding peptide
  MOD_RES (5), (6): Xaa is C or S
VPKPXXAPTQLEPISVLYL

SEQ ID NO: 9551 - protein, 23 aa, Artificial Sequence
  Cyclic GFR-binding peptide
  MOD_RES (7), (7): Xaa is C or S
HVTKPTXAPTKLSPISVLYIDDS

SEQ ID NO: 9552 - protein, 19 aa, Artificial Sequence
  Cyclic GFR-binding peptide
  MOD_RES (5), (6): Xaa is C or S
SASPXXVSQDLSPISILYI

SEQ ID NO: 9553 - protein, 16 aa, Artificial Sequence
  Cyclic GFR-binding peptide
LSPISVLYIDSSNNVI

SEQ ID NO: 9554 - protein, 22 aa, Artificial Sequence
  Cyclic GFR-binding peptide
  MOD_RES (7), (7): Xaa is C or S
HVTKPTXAPTKLSPISVLYIDD

SEQ ID NO: 9555 - protein, 15 aa, Artificial Sequence
  Cyclic GFR-binding peptide
EPISVLYLDSSNNVI

SEQ ID NO: 9556 - protein, 23 aa, Artificial Sequence
  Cyclic GFR-binding peptide
  MOD_RES (6), (7): Xaa is C or S
YVPKPXXAPTKLEPISVLYLDDS

SEQ ID NO: 9557 - protein, 22 aa, Artificial Sequence
  Cyclic GFR-binding peptide
  MOD_RES (6), (7): Xaa is C or S
KIPKAXXVPTELEPISMLYLDE

SEQ ID NO: 9558 - protein, 17 aa, Artificial Sequence
  Cyclic GFR-binding peptide
KLSPISVLYIDSSNNVI

SEQ ID NO: 9559 - protein, 13 aa, Artificial Sequence
  Cyclic GFR-binding peptide
VPTKLNAISILYF

SEQ ID NO: 9560 - protein, 25 aa, Artificial Sequence
  Cyclic GFR-binding peptide
  MOD_RES (6), (7): Xaa is C or S
YVPKPXXAPTKLEPISVLYLDDSSN

SEQ ID NO: 9561 - protein, 15 aa, Artificial Sequence
  Cyclic GFR-binding peptide
  MOD_RES (1), (2): Xaa is C or S
XXVPTKLNAISILYF

SEQ ID NO: 9562 - protein, 16 aa, Artificial Sequence
  Cyclic GFR-binding peptide
LEPISILYLDAANNVV

SEQ ID NO: 9563 - protein, 18 aa, Artificial Sequence
  Cyclic GFR-binding peptide
TKLSPISILYKDKGVVTY

SEQ ID NO: 9564 - protein, 27 aa, Artificial Sequence
  Cyclic GFR-binding peptide
  MOD_RES (6), (7): Xaa is C or S
ASAAPXXVPQALEPISILYLVGRKPKV

SEQ ID NO: 9565 - protein, 15 aa, Artificial Sequence
  Cyclic GFR-binding peptide
NAISILYFDKGVVTY

SEQ ID NO: 9566 - protein, 25 aa, Artificial Sequence
  Cyclic GFR-binding peptide
  MOD_RES (6), (7): Xaa is C or S
ASASPXXVPQDLEPISILYLVGRTP

SEQ ID NO: 9567 - protein, 22 aa, Artificial Sequence
  Cyclic GFR-binding peptide
  MOD_RES (6), (7): Xaa is C or S
SIPKAXXVPTELSPISMLYIDE

SEQ ID NO: 9568 - protein, 22 aa, Artificial Sequence
  Cyclic GFR-binding peptide
  MOD_RES (6), (7): Xaa is C or S
ASAAPXXVPQALEPISILYLVG

SEQ ID NO: 9569 - protein, 20 aa, Artificial Sequence
  Cyclic GFR-binding peptide
  MOD_RES (6), (7): Xaa is C or S
ASASPXXVPQDLSPISILYI

SEQ ID NO: 9570 - protein, 25 aa, Artificial Sequence
  Cyclic GFR-binding peptide
  MOD_RES (6), (7): Xaa is C or S
KVGKAXXVPTKLSPISVLYIDDMGV

SEQ ID NO: 9571 - protein, 17 aa, Artificial Sequence
  Cyclic GFR-binding peptide
  MOD_RES (3), (4): Xaa is C or S
KAXXVPTKLEPISVLYL

SEQ ID NO: 9572 - protein, 25 aa, Artificial Sequence
  Cyclic GFR-binding peptide
  MOD_RES (6), (7): Xaa is C or S
ASASPXXVPQDLSPISILYIVGRTP

SEQ ID NO: 9573 - protein, 26 aa, Artificial Sequence
  Cyclic GFR-binding peptide
  MOD_RES (6), (7): Xaa is C or S
KASKAXXVPTKLSPISILYKDKGVVT

SEQ ID NO: 9574 - protein, 14 aa, Artificial Sequence
  Cyclic GFR-binding peptide
  MOD_RES (1), (1): Xaa is C or S
XVPQALEPISILYL

SEQ ID NO: 9575 - protein, 27 aa, Artificial Sequence
  Cyclic GFR-binding peptide
  MOD_RES (6), (7): Xaa is C or S
AAPASXXVPARLSPISILYKDAANNVV

SEQ ID NO: 9576 - protein, 18 aa, Artificial Sequence
  Cyclic GFR-binding peptide
  MOD_RES (5), (5): Xaa is C or S
TKPTXAPTKLEPISVLYL

SEQ ID NO: 9577 - protein, 17 aa, Artificial Sequence
  Cyclic GFR-binding peptide
DLEPISILYLIGKTPKI

SEQ ID NO: 9578 - protein, 19 aa, Artificial Sequence
  Cyclic GFR-binding peptide
PTQLEPISVLYLDDSSNVI

SEQ ID NO: 9579 - protein, 17 aa, Artificial Sequence
  Cyclic GFR-binding peptide
  MOD_RES (3), (4): Xaa is C or S
KPXXAPTQLEPISVLYL

SEQ ID NO: 9580 - protein, 24 aa, Artificial Sequence
  Cyclic GFR-binding peptide
  MOD_RES (6), (7): Xaa is C or S
AVPKAXXAPTKLSPISVLYIDSSN

SEQ ID NO: 9581 - protein, 26 aa, Artificial Sequence
  Cyclic GFR-binding peptide
  MOD_RES (6), (7): Xaa is C or S
YVPKPXXAPTKLSPISVLYIDDSSNV

SEQ ID NO: 9582 - protein, 16 aa, Artificial Sequence
  Cyclic GFR-binding peptide
LEPISVLYLDDSSNVI

SEQ ID NO: 9583 - protein, 27 aa, Artificial Sequence
  Cyclic GFR-binding peptide
  MOD_RES (6), (7): Xaa is C or S
SIPKAXXVPTELEPISMLYLDEYDKVV

SEQ ID NO: 9584 - protein, 18 aa, Artificial Sequence
  Cyclic GFR-binding peptide
QDLSPISILYIVGRTPKV

SEQ ID NO: 9585 - protein, 19 aa, Artificial Sequence
  Cyclic GFR-binding peptide
PTKLSPISVLYIDSSNNVI

SEQ ID NO: 9586 - protein, 23 aa, Artificial Sequence
  Cyclic GFR-binding peptide
  MOD_RES (6), (7): Xaa is C or S
AAPASXXVPARLEPISILYLDAA

SEQ ID NO: 9587 - protein, 16 aa, Artificial Sequence
  Cyclic GFR-binding peptide
  MOD_RES (2), (3): Xaa is C or S
AXXVPTELEPISMLYL

SEQ ID NO: 9588 - protein, 24 aa, Artificial Sequence
  Cyclic GFR-binding peptide
  MOD_RES (6), (7): Xaa is C or S
AVPKAXXAPTKLEPISVLYLDSSN

SEQ ID NO: 9589 - protein, 23 aa, Artificial Sequence
  Cyclic GFR-binding peptide
  MOD_RES (6), (7): Xaa is C or S
ASASPXXVSQDLEPISILYLIGK

SEQ ID NO: 9590 - protein, 15 aa, Artificial Sequence
  Cyclic GFR-binding peptide
SPISMLYIDEYDKVV

SEQ ID NO: 9591 - protein, 22 aa, Artificial Sequence
  Cyclic GFR-binding peptide
  MOD_RES (6), (7): Xaa is C or S
ASAAPXXVPQALSPISILYIVG

SEQ ID NO: 9592 - protein, 21 aa, Artificial Sequence
  Cyclic GFR-binding peptide
  MOD_RES (6), (7): Xaa is C or S
KASKAXXVPTKLSPISILYID

SEQ ID NO: 9593 - protein, 13 aa, Artificial Sequence
  Cyclic GFR-binding peptide
APTQLEPISVLYL

SEQ ID NO: 9594 - protein, 14 aa, Artificial Sequence
  Cyclic GFR-binding peptide
  MOD_RES (1), (1): Xaa is C or S
XVPQDLEPISILYL

SEQ ID NO: 9595 - protein, 19 aa, Artificial Sequence
  Cyclic GFR-binding peptide
  MOD_RES (5), (6): Xaa is C or S
VPKAXXAPTKLEPISVLYL

SEQ ID NO: 9596 - protein, 15 aa, Artificial Sequence
  Cyclic GFR-binding peptide
  MOD_RES (1), (2): Xaa is C or S
XXAPTQLEPISVLYL

SEQ ID NO: 9597 - protein, 21 aa, Artificial Sequence
  Cyclic GFR-binding peptide
  MOD_RES (6), (7): Xaa is C or S
ASAAPXXVPQALSPISILYIV

SEQ ID NO: 9598 - protein, 26 aa, Artificial Sequence
  Cyclic GFR-binding peptide
  MOD_RES (6), (7): Xaa is C or S
AVPKAXXAPTKLEPISVLYLDSSNNV

SEQ ID NO: 9599 - protein, 20 aa, Artificial Sequence
  Cyclic GFR-binding peptide
  MOD_RES (6), (7): Xaa is C or S
KASKAXXVPTKLSPISILYK

SEQ ID NO: 9600 - protein, 20 aa, Artificial Sequence
  Cyclic GFR-binding peptide
  MOD_RES (6), (7): Xaa is C or S
KASKAXXVPTKLSPISILYI

SEQ ID NO: 9601 - protein, 13 aa, Artificial Sequence
  Cyclic GFR-binding peptide
VPARLEPISILYL

SEQ ID NO: 9602 - protein, 15 aa, Artificial Sequence
  Cyclic GFR-binding peptide
  MOD_RES (1), (2): Xaa is C or S
XXAPTKLSPISVLYI

SEQ ID NO: 9603 - protein, 19 aa, Artificial Sequence
  Cyclic GFR-binding peptide
  MOD_RES (5), (6): Xaa is C or S
APASXXVPARLEPISILYL

SEQ ID NO: 9604 - protein, 16 aa, Artificial Sequence
  Cyclic GFR-binding peptide
  MOD_RES (2), (3): Xaa is C or S
PXXAPTKLSPISVLYI

SEQ ID NO: 9605 - protein, 22 aa, Artificial Sequence
  Cyclic GFR-binding peptide
  MOD_RES (6), (7): Xaa is C or S
YVPKPXXAPTKLEPISVLYLDD

SEQ ID NO: 9606 - protein, 19 aa, Artificial Sequence
  Cyclic GFR-binding peptide
  MOD_RES (5), (6): Xaa is C or S
SAAPXXVPQALSPISILYI

SEQ ID NO: 9607 - protein, 18 aa, Artificial Sequence
  Cyclic GFR-binding peptide
  MOD_RES (4), (5): Xaa is C or S
PKAXXVPTELEPISMLYL

SEQ ID NO: 9608 - protein, 17 aa, Artificial Sequence
  Cyclic GFR-binding peptide
DLSPISILYIVGRTPKV

SEQ ID NO: 9609 - protein, 21 aa, Artificial Sequence
  Cyclic GFR-binding peptide
  MOD_RES (6), (7): Xaa is C or S
AAPASXXVPARLSPISILYKD

SEQ ID NO: 9610 - protein, 13 aa, Artificial Sequence
  Cyclic GFR-binding peptide
VPQDLSPISILYI

SEQ ID NO: 9611 - protein, 14 aa, Artificial Sequence
  Cyclic GFR-binding peptide
  MOD_RES (1), (1): Xaa is C or S
XAPTQLSPISVLYI

SEQ ID NO: 9612 - protein, 15 aa, Artificial Sequence
  Cyclic GFR-binding peptide
  MOD_RES (1), (2): Xaa is C or S
XXVPTKLSPISVLYI

SEQ ID NO: 9613 - protein, 15 aa, Artificial Sequence
  Cyclic GFR-binding peptide
SPISVLYIDDMGVPT

SEQ ID NO: 9614 - protein, 22 aa, Artificial Sequence
  Cyclic GFR-binding peptide
  MOD_RES (6), (7): Xaa is C or S
TVPKPXXAPTQLEPISVLYLDD

SEQ ID NO: 9615 - protein, 18 aa, Artificial Sequence
  Cyclic GFR-binding peptide
QALEPISILYLVGRKPKV

SEQ ID NO: 9616 - protein, 16 aa, Artificial Sequence
  Cyclic GFR-binding peptide
LEPISILYLIGKTPKI

SEQ ID NO: 9617 - protein, 18 aa, Artificial Sequence
  Cyclic GFR-binding peptide
  MOD_RES (4), (5): Xaa is C or S
PKPXXAPTKLEPISVLYL

SEQ ID NO: 9618 - protein, 20 aa, Artificial Sequence
  Cyclic GFR-binding peptide
  MOD_RES (6), (7): Xaa is C or S
SIPKAXXVPTELSPISMLYI

SEQ ID NO: 9619 - protein, 23 aa, Artificial Sequence
  Cyclic GFR-binding peptide
  MOD_RES (6), (7): Xaa is C or S
SIPKAXXVPTELEPISMLYLDEY

SEQ ID NO: 9620 - protein, 24 aa, Artificial Sequence
  Cyclic GFR-binding peptide
  MOD_RES (6), (7): Xaa is C or S
ASAAPXXVPQALEPISILYLVGRK

SEQ ID NO: 9621 - protein, 18 aa, Artificial Sequence
  Cyclic GFR-binding peptide
  MOD_RES (4), (5): Xaa is C or S
GKAXXVPTKLEPISVLYL

SEQ ID NO: 9622 - protein, 19 aa, Artificial Sequence
  Cyclic GFR-binding peptide
  MOD_RES (5), (6): Xaa is C or S
SASPXXVPQDLSPISILYI

SEQ ID NO: 9623 - protein, 20 aa, Artificial Sequence
  Cyclic GFR-binding peptide
  MOD_RES (6), (7): Xaa is C or S
KASKAXXVPTKLNAISILYF

SEQ ID NO: 9624 - protein, 22 aa, Artificial Sequence
  Cyclic GFR-binding peptide
  MOD_RES (6), (7): Xaa is C or S
YVPKPXXAPTKLSPISVLYIDD

SEQ ID NO: 9625 - protein, 20 aa, Artificial Sequence
  Cyclic GFR-binding peptide
  MOD_RES (6), (7): Xaa is C or S
YVPKPXXAPTKLSPISVLYI

SEQ ID NO: 9626 - protein, 16 aa, Artificial Sequence
  Cyclic GFR-binding peptide
  MOD_RES (2), (3): Xaa is C or S
AXXVPTKLNAISILYF

SEQ ID NO: 9627 - protein, 16 aa, Artificial Sequence
  Cyclic GFR-binding peptide
LSPISMLYIDENEKVV

SEQ ID NO: 9628 - protein, 15 aa, Artificial Sequence
  Cyclic GFR-binding peptide
EPISMLYLDEYDKVV

SEQ ID NO: 9629 - protein, 25 aa, Artificial Sequence
  Cyclic GFR-binding peptide
  MOD_RES (6), (7): Xaa is C or S
ASASPXXVSQDLSPISILYIIGKTP

SEQ ID NO: 9630 - protein, 17 aa, Artificial Sequence
  Cyclic GFR-binding peptide
  MOD_RES (3), (4): Xaa is C or S
ASXXVPARLNAISILYF

SEQ ID NO: 9631 - protein, 23 aa, Artificial Sequence
  Cyclic GFR-binding peptide
  MOD_RES (6), (7): Xaa is C or S
AVPKAXXAPTKLSPISVLYIDSS

SEQ ID NO: 9632 - protein, 24 aa, Artificial Sequence
  Cyclic GFR-binding peptide
  MOD_RES (6), (7): Xaa is C or S
ASASPXXVPQDLSPISILYIVGRT

SEQ ID NO: 9633 - protein, 19 aa, Artificial Sequence
  Cyclic GFR-binding peptide
  MOD_RES (5), (6): Xaa is C or S
VPKPXXAPTQLSPISVLYI

SEQ ID NO: 9634 - protein, 19 aa, Artificial Sequence
  Cyclic GFR-binding peptide
  MOD_RES (5), (6): Xaa is C or S
ASKAXXVPTKLNAISILYF

SEQ ID NO: 9635 - protein, 22 aa, Artificial Sequence
  Cyclic GFR-binding peptide
  MOD_RES (6), (7): Xaa is C or S
TVPKPXXAPTQLSPISVLYIDD

SEQ ID NO: 9636 - protein, 25 aa, Artificial Sequence
  Cyclic GFR-binding peptide
  MOD_RES (6), (7): Xaa is C or S
AVPKAXXAPTKLEPISVLYLDSSNN

SEQ ID NO: 9637 - protein, 24 aa, Artificial Sequence
  Cyclic GFR-binding peptide
  MOD_RES (6), (7): Xaa is C or S
KVGKAXXVPTKLSPISVLYIDDMG

SEQ ID NO: 9638 - protein, 19 aa, Artificial Sequence
  Cyclic GFR-binding peptide
  MOD_RES (5), (6): Xaa is C or S
VPKPXXAPTKLSPISVLYI

SEQ ID NO: 9639 - protein, 17 aa, Artificial Sequence
  Cyclic GFR-binding peptide
  MOD_RES (3), (4): Xaa is C or S
KAXXVPTKLSPISVLYI

SEQ ID NO: 9640 - protein, 16 aa, Artificial Sequence
  Cyclic GFR-binding peptide
  MOD_RES (3), (3): Xaa is C or S
PTXAPTKLSPISVLYI

SEQ ID NO: 9641 - protein, 19 aa, Artificial Sequence
  Cyclic GFR-binding peptide
PTKLSPISVLYIDDSSNVI

SEQ ID NO: 9642 - protein, 25 aa, Artificial Sequence
  Cyclic GFR-binding peptide
  MOD_RES (6), (7): Xaa is C or S
AAPASXXVPARLEPISILYLDAANN

SEQ ID NO: 9643 - protein, 27 aa, Artificial Sequence
  Cyclic GFR-binding peptide
  MOD_RES (6), (7): Xaa is C or S
KVGKAXXVPTKLEPISVLYLDDMGVPT

SEQ ID NO: 9644 - protein, 27 aa, Artificial Sequence
  Cyclic GFR-binding peptide
  MOD_RES (6), (7): Xaa is C or S
AAPASXXVPARLNAISILYFDAANNVV

SEQ ID NO: 9645 - protein, 19 aa, Artificial Sequence
  Cyclic GFR-binding peptide
PTQLSPISVLYIDDSSNVI

SEQ ID NO: 9646 - protein, 25 aa, Artificial Sequence
  Cyclic GFR-binding peptide
  MOD_RES (7), (7): Xaa is C or S
HVTKPTXAPTKLSPISVLYIDDSSN

SEQ ID NO: 9647 - protein, 15 aa, Artificial Sequence
  Cyclic GFR-binding peptide
  MOD_RES (1), (2): Xaa is C or S
XXVPQALEPISILYL

SEQ ID NO: 9648 - protein, 13 aa, Artificial Sequence
  Cyclic GFR-binding peptide
VSQDLSPISILYI

SEQ ID NO: 9649 - protein, 24 aa, Artificial Sequence
  Cyclic GFR-binding peptide
  MOD_RES (7), (7): Xaa is C or S
HVTKPTXAPTKLEPISVLYLDDSS

SEQ ID NO: 9650 - protein, 20 aa, Artificial Sequence
  Cyclic GFR-binding peptide
  MOD_RES (6), (7): Xaa is C or S
ASASPXXVSQDLSPISILYI

SEQ ID NO: 9651 - protein, 17 aa, Artificial Sequence
  Cyclic GFR-binding peptide
KLSPISVLYIDDMGVPT

SEQ ID NO: 9652 - protein, 21 aa, Artificial Sequence
  Cyclic GFR-binding peptide
  MOD_RES (6), (7): Xaa is C or S
TVPKPXXAPTQLSPISVLYID

SEQ ID NO: 9653 - protein, 16 aa, Artificial Sequence
  Cyclic GFR-binding peptide
LSPISMLYIDEYDKVV

SEQ ID NO: 9654 - protein, 21 aa, Artificial Sequence
  Cyclic GFR-binding peptide
  MOD_RES (6), (7): Xaa is C or S
SIPKAXXVPTELSPISMLYID

SEQ ID NO: 9655 - protein, 16 aa, Artificial Sequence
  Cyclic GFR-binding peptide
  MOD_RES (2), (3): Xaa is C or S
PXXAPTQLSPISVLYI

SEQ ID NO: 9656 - protein, 18 aa, Artificial Sequence
  Cyclic GFR-binding peptide
QDLSPISILYIIGKTPKI

SEQ ID NO: 9657 - protein, 18 aa, Artificial Sequence
  Cyclic GFR-binding peptide
  MOD_RES (4), (5): Xaa is C or S
AAPXXVPQALEPISILYL

SEQ ID NO: 9658 - protein, 15 aa, Artificial Sequence
  Cyclic GFR-binding peptide
  MOD_RES (1), (2): Xaa is C or S
XXVPTKLSPISILYI

SEQ ID NO: 9659 - protein, 15 aa, Artificial Sequence
  Cyclic GFR-binding peptide
  MOD_RES (1), (2): Xaa is C or S
XXVPTKLSPISILYK

SEQ ID NO: 9660 - protein, 21 aa, Artificial Sequence
  Cyclic GFR-binding peptide
  MOD_RES (6), (7): Xaa is C or S
AAPASXXVPARLNAISILYFD

SEQ ID NO: 9661 - protein, 24 aa, Artificial Sequence
  Cyclic GFR-binding peptide
  MOD_RES (6), (7): Xaa is C or S
SIPKAXXVPTELSPISMLYIDEYD

SEQ ID NO: 9662 - protein, 17 aa, Artificial Sequence
  Cyclic GFR-binding peptide
  MOD_RES (3), (4): Xaa is C or S
SPXXVPQDLEPISILYL

SEQ ID NO: 9663 - protein, 22 aa, Artificial Sequence
  Cyclic GFR-binding peptide
  MOD_RES (7), (7): Xaa is C or S
HVTKPTXAPTKLEPISVLYLDD

SEQ ID NO: 9664 - protein, 16 aa, Artificial Sequence
  Cyclic GFR-binding peptide
LEPISILYLVGRKPKV

SEQ ID NO: 9665 - protein, 25 aa, Artificial Sequence
  Cyclic GFR-binding peptide
  MOD_RES (6), (7): Xaa is C or S
AVPKAXXAPTKLSPISVLYIDSSNN

SEQ ID NO: 9666 - protein, 19 aa, Artificial Sequence
  Cyclic GFR-binding peptide
PQDLSPISILYIVGRTPKV

SEQ ID NO: 9667 - protein, 27 aa, Artificial Sequence
  Cyclic GFR-binding peptide
  MOD_RES (6), (7): Xaa is C or S
TVPKPXXAPTQLEPISVLYLDDSSNVI

SEQ ID NO: 9668 - protein, 25 aa, Artificial Sequence
  Cyclic GFR-binding peptide
  MOD_RES (6), (7): Xaa is C or S
KASKAXXVPTKLSPISILYKDKGVV

SEQ ID NO: 9669 - protein, 23 aa, Artificial Sequence
  Cyclic GFR-binding peptide
  MOD_RES (6), (7): Xaa is C or S
ASAAPXXVPQALSPISILYIVGR

SEQ ID NO: 9670 - protein, 14 aa, Artificial Sequence
  Cyclic GFR-binding peptide
  MOD_RES (1), (1): Xaa is C or S
XVPTELEPISMLYL

SEQ ID NO: 9671 - protein, 18 aa, Artificial Sequence
  Cyclic GFR-binding peptide
ARLSPISILYKDAANNVV

SEQ ID NO: 9672 - protein, 17 aa, Artificial Sequence
  Cyclic GFR-binding peptide
ELEPISMLYLDEYDKVV

SEQ ID NO: 9673 - protein, 16 aa, Artificial Sequence
  Cyclic GFR-binding peptide
  MOD_RES (2), (3): Xaa is C or S
PXXVSQDLEPISILYL

SEQ ID NO: 9674 - protein, 14 aa, Artificial Sequence
  Cyclic GFR-binding peptide
  MOD_RES (1), (1): Xaa is C or S
XAPTKLSPISVLYI

SEQ ID NO: 9675 - protein, 16 aa, Artificial Sequence
  Cyclic GFR-binding peptide
  MOD_RES (2), (3): Xaa is C or S
PXXVPQALEPISILYL

SEQ ID NO: 9676 - protein, 20 aa, Artificial Sequence
  Cyclic GFR-binding peptide
  MOD_RES (6), (7): Xaa is C or S
ASASPXXVPQDLEPISILYL

SEQ ID NO: 9677 - protein, 22 aa, Artificial Sequence
  Cyclic GFR-binding peptide
  MOD_RES (6), (7): Xaa is C or S
KASKAXXVPTKLSPISILYKDK

SEQ ID NO: 9678 - protein, 14 aa, Artificial Sequence
  Cyclic GFR-binding peptide
  MOD_RES (1), (1): Xaa is C or S
XVPTKLEPISVLYL

SEQ ID NO: 9679 - protein, 19 aa, Artificial Sequence
  Cyclic GFR-binding peptide
PTELSPISMLYIDENEKVV

SEQ ID NO: 9680 - protein, 16 aa, Artificial Sequence
  Cyclic GFR-binding peptide
  MOD_RES (2), (3): Xaa is C or S
AXXAPTKLEPISVLYL

SEQ ID NO: 9681 - protein, 17 aa, Artificial Sequence
  Cyclic GFR-binding peptide
  MOD_RES (3), (4): Xaa is C or S
KAXXAPTKLSPISVLYI

SEQ ID NO: 9682 - protein, 24 aa, Artificial Sequence
  Cyclic GFR-binding peptide
  MOD_RES (6), (7): Xaa is C or S
KIPKAXXVPTELSPISMLYIDENE

SEQ ID NO: 9683 - protein, 13 aa, Artificial Sequence
  Cyclic GFR-binding peptide
VPQALSPISILYI

SEQ ID NO: 9684 - protein, 15 aa, Artificial Sequence
  Cyclic GFR-binding peptide
  MOD_RES (1), (2): Xaa is C or S
XXAPTQLSPISVLYI

SEQ ID NO: 9685 - protein, 17 aa, Artificial Sequence
  Cyclic GFR-binding peptide
RLEPISILYLDAANNVV

SEQ ID NO: 9686 - protein, 16 aa, Artificial Sequence
  Cyclic GFR-binding peptide
LNAISILYFDKGVVTY

SEQ ID NO: 9687 - protein, 27 aa, Artificial Sequence
  Cyclic GFR-binding peptide
  MOD_RES (6), (7): Xaa is C or S
YVPKPXXAPTKLSPISVLYIDDSSNVI

SEQ ID NO: 9688 - protein, 21 aa, Artificial Sequence
  Cyclic GFR-binding peptide
  MOD_RES (6), (7): Xaa is C or S
ASAAPXXVPQALEPISILYLV

SEQ ID NO: 9689 - protein, 15 aa, Artificial Sequence
  Cyclic GFR-binding peptide
  MOD_RES (1), (2): Xaa is C or S
XXVSQDLEPISILYL

SEQ ID NO: 9690 - protein, 18 aa, Artificial Sequence
  Cyclic GFR-binding peptide
  MOD_RES (4), (5): Xaa is C or S
PASXXVPARLEPISILYL

SEQ ID NO: 9691 - protein, 19 aa, Artificial Sequence
  Cyclic GFR-binding peptide
  MOD_RES (6), (6): Xaa is C or S
VTKPTXAPTKLSPISVLYI

SEQ ID NO: 9692 - protein, 22 aa, Artificial Sequence
  Cyclic GFR-binding peptide
  MOD_RES (6), (7): Xaa is C or S
KASKAXXVPTKLNAISILYFDK

SEQ ID NO: 9693 - protein, 18 aa, Artificial Sequence
  Cyclic GFR-binding peptide
  MOD_RES (4), (5): Xaa is C or S
PKAXXAPTKLSPISVLYI

SEQ ID NO: 9694 - protein, 22 aa, Artificial Sequence
  Cyclic GFR-binding peptide
  MOD_RES (6), (7): Xaa is C or S
ASASPXXVSQDLEPISILYLIG

SEQ ID NO: 9695 - protein, 18 aa, Artificial Sequence
  Cyclic GFR-binding peptide
ARLNAISILYFDAANNVV

SEQ ID NO: 9696 - protein, 20 aa, Artificial Sequence
  Cyclic GFR-binding peptide
  MOD_RES (6), (7): Xaa is C or S
KIPKAXXVPTELSPISMLYI

SEQ ID NO: 9697 - protein, 18 aa, Artificial Sequence
  Cyclic GFR-binding peptide
  MOD_RES (4), (5): Xaa is C or S
SKAXXVPTKLNAISILYF

SEQ ID NO: 9698 - protein, 27 aa, Artificial Sequence
  Cyclic GFR-binding peptide
  MOD_RES (6), (7): Xaa is C or S
AVPKAXXAPTKLSPISVLYIDSSNNVI

SEQ ID NO: 9699 - protein, 18 aa, Artificial Sequence
  Cyclic GFR-binding peptide
TKLEPISVLYLDDMGVPT

SEQ ID NO: 9700 - protein, 15 aa, Artificial Sequence
  Cyclic GFR-binding peptide
EPISILYLDAANNVV

SEQ ID NO: 9701 - protein, 23 aa, Artificial Sequence
  Cyclic GFR-binding peptide
  MOD_RES (6), (7): Xaa is C or S
KASKAXXVPTKLNAISILYFDKG

SEQ ID NO: 9702 - protein, 21 aa, Artificial Sequence
  Cyclic GFR-binding peptide
  MOD_RES (6), (7): Xaa is C or S
KIPKAXXVPTELEPISMLYLD

SEQ ID NO: 9703 - protein, 19 aa, Artificial Sequence
  Cyclic GFR-binding peptide
PTKLSPISILYKDKGVVTY

SEQ ID NO: 9704 - protein, 19 aa, Artificial Sequence
  Cyclic GFR-binding peptide
  MOD_RES (5), (6): Xaa is C or S
VGKAXXVPTKLSPISVLYI

SEQ ID NO: 9705 - protein, 27 aa, Artificial Sequence
  Cyclic GFR-binding peptide
  MOD_RES (6), (7): Xaa is C or S
KIPKAXXVPTELSPISMLYIDENEKVV

SEQ ID NO: 9706 - protein, 25 aa, Artificial Sequence
  Cyclic GFR-binding peptide
  MOD_RES (7), (7): Xaa is C or S
HVTKPTXAPTKLEPISVLYLDDSSN

SEQ ID NO: 9707 - protein, 19 aa, Artificial Sequence
  Cyclic GFR-binding peptide
  MOD_RES (5), (6): Xaa is C or S
IPKAXXVPTELEPISMLYL

SEQ ID NO: 9708 - protein, 20 aa, Artificial Sequence
  Cyclic GFR-binding peptide
  MOD_RES (7), (7): Xaa is C or S
HVTKPTXAPTKLSPISVLYI

SEQ ID NO: 9709 - protein, 23 aa, Artificial Sequence
  Cyclic GFR-binding peptide
  MOD_RES (6), (7): Xaa is C or S
ASASPXXVSQDLSPISILYIIGK

SEQ ID NO: 9710 - protein, 22 aa, Artificial Sequence
  Cyclic GFR-binding peptide
  MOD_RES (6), (7): Xaa is C or S
KASKAXXVPTKLSPISILYIDK

SEQ ID NO: 9711 - protein, 17 aa, Artificial Sequence
  Cyclic GFR-binding peptide
  MOD_RES (3), (4): Xaa is C or S
KAXXVPTKLSPISILYK

SEQ ID NO: 9712 - protein, 17 aa, Artificial Sequence
  Cyclic GFR-binding peptide
  MOD_RES (3), (4): Xaa is C or S
KAXXVPTKLSPISILYI

SEQ ID NO: 9713 - protein, 16 aa, Artificial Sequence
  Cyclic GFR-binding peptide
LSPISILYKDKGVVTY

SEQ ID NO: 9714 - protein, 22 aa, Artificial Sequence
  Cyclic GFR-binding peptide
  MOD_RES (6), (7): Xaa is C or S
ASASPXXVSQDLSPISILYIIG

SEQ ID NO: 9715 - protein, 22 aa, Artificial Sequence
  Cyclic GFR-binding peptide
  MOD_RES (6), (7): Xaa is C or S
AVPKAXXAPTKLSPISVLYIDS

SEQ ID NO: 9716 - protein, 21 aa, Artificial Sequence
  Cyclic GFR-binding peptide
  MOD_RES (6), (7): Xaa is C or S
ASASPXXVSQDLSPISILYII

SEQ ID NO: 9717 - protein, 18 aa, Artificial Sequence
  Cyclic GFR-binding peptide
  MOD_RES (4), (5): Xaa is C or S
ASPXXVSQDLSPISILYI

SEQ ID NO: 9718 - protein, 26 aa, Artificial Sequence
  Cyclic GFR-binding peptide
  MOD_RES (6), (7): Xaa is C or S
AAPASXXVPARLNAISILYFDAANNV

SEQ ID NO: 9719 - protein, 15 aa, Artificial Sequence
  Cyclic GFR-binding peptide
  MOD_RES (1), (2): Xaa is C or S
XXAPTKLEPISVLYL

SEQ ID NO: 9720 - protein, 21 aa, Artificial Sequence
  Cyclic GFR-binding peptide
  MOD_RES (6), (7): Xaa is C or S
AAPASXXVPARLEPISILYLD

SEQ ID NO: 9721 - protein, 15 aa, Artificial Sequence
  Cyclic GFR-binding peptide
EPISMLYLDENEKVV

SEQ ID NO: 9722 - protein, 21 aa, Artificial Sequence
  Cyclic GFR-binding peptide
  MOD_RES (6), (7): Xaa is C or S
KVGKAXXVPTKLSPISVLYID

SEQ ID NO: 9723 - protein, 19 aa, Artificial Sequence
  Cyclic GFR-binding peptide
  MOD_RES (5), (6): Xaa is C or S
VPKPXXAPTKLEPISVLYL

SEQ ID NO: 9724 - protein, 26 aa, Artificial Sequence
  Cyclic GFR-binding peptide
  MOD_RES (6), (7): Xaa is C or S
AAPASXXVPARLEPISILYLDAANNV

SEQ ID NO: 9725 - protein, 23 aa, Artificial Sequence
  Cyclic GFR-binding peptide
  MOD_RES (7), (7): Xaa is C or S
HVTKPTXAPTKLEPISVLYLDDS

SEQ ID NO: 9726 - protein, 17 aa, Artificial Sequence
  Cyclic GFR-binding peptide
  MOD_RES (3), (4): Xaa is C or S
ASXXVPARLEPISILYL

SEQ ID NO: 9727 - protein, 15 aa, Artificial Sequence
  Cyclic GFR-binding peptide
SPISILYIVGRTPKV

SEQ ID NO: 9728 - protein, 18 aa, Artificial Sequence
  Cyclic GFR-binding peptide
  MOD_RES (4), (5): Xaa is C or S
PKAXXVPTELSPISMLYI

SEQ ID NO: 9729 - protein, 19 aa, Artificial Sequence
  Cyclic GFR-binding peptide
  MOD_RES (5), (6): Xaa is C or S
VGKAXXVPTKLEPISVLYL

SEQ ID NO: 9730 - protein, 25 aa, Artificial Sequence
  Cyclic GFR-binding peptide
  MOD_RES (6), (7): Xaa is C or S
ASAAPXXVPQALSPISILYIVGRKP

SEQ ID NO: 9731 - protein, 24 aa, Artificial Sequence
  Cyclic GFR-binding peptide
  MOD_RES (6), (7): Xaa is C or S
SIPKAXXVPTELEPISMLYLDEYD

SEQ ID NO: 9732 - protein, 24 aa, Artificial Sequence
  Cyclic GFR-binding peptide
  MOD_RES (6), (7): Xaa is C or S
KASKAXXVPTKLSPISILYIDKGV

SEQ ID NO: 9733 - protein, 24 aa, Artificial Sequence
  Cyclic GFR-binding peptide
  MOD_RES (6), (7): Xaa is C or S
ASASPXXVSQDLEPISILYLIGKT

SEQ ID NO: 9734 - protein, 16 aa, Artificial Sequence
  Cyclic GFR-binding peptide
  MOD_RES (2), (3): Xaa is C or S
PXXVPQDLEPISILYL

SEQ ID NO: 9735 - protein, 24 aa, Artificial Sequence
  Cyclic GFR-binding peptide
  MOD_RES (6), (7): Xaa is C or S
TVPKPXXAPTQLSPISVLYIDDSS

SEQ ID NO: 9736 - protein, 16 aa, Artificial Sequence
  Cyclic GFR-binding peptide
LSPISILYIVGRKPKV

SEQ ID NO: 9737 - protein, 20 aa, Artificial Sequence
  Cyclic GFR-binding peptide
  MOD_RES (6), (7): Xaa is C or S
ASASPXXVSQDLEPISILYL

SEQ ID NO: 9738 - protein, 16 aa, Artificial Sequence
  Cyclic GFR-binding peptide
LEPISILYLVGRTPKV

SEQ ID NO: 9739 - protein, 15 aa, Artificial Sequence
  Cyclic GFR-binding peptide
NAISILYFDAANNVV

SEQ ID NO: 9740 - protein, 26 aa, Artificial Sequence
  Cyclic GFR-binding peptide
  MOD_RES (6), (7): Xaa is C or S
AVPKAXXAPTKLSPISVLYIDSSNNV

SEQ ID NO: 9741 - protein, 13 aa, Artificial Sequence
  Cyclic GFR-binding peptide
VPARLNAISILYF

SEQ ID NO: 9742 - protein, 20 aa, Artificial Sequence
  Cyclic GFR-binding peptide
  MOD_RES (6), (7): Xaa is C or S
SIPKAXXVPTELEPISMLYL

SEQ ID NO: 9743 - protein, 20 aa, Artificial Sequence
  Cyclic GFR-binding peptide
  MOD_RES (6), (7): Xaa is C or S
AAPASXXVPARLEPISILYL

SEQ ID NO: 9744 - protein, 20 aa, Artificial Sequence
  Cyclic GFR-binding peptide
  MOD_RES (7), (7): Xaa is C or S
HVTKPTXAPTKLEPISVLYL

SEQ ID NO: 9745 - protein, 15 aa, Artificial Sequence
  Cyclic GFR-binding peptide
  MOD_RES (1), (2): Xaa is C or S
XXVPARLSPISILYK

SEQ ID NO: 9746 - protein, 25 aa, Artificial Sequence
  Cyclic GFR-binding peptide
  MOD_RES (6), (7): Xaa is C or S
KVGKAXXVPTKLEPISVLYLDDMGV

SEQ ID NO: 9747 - protein, 15 aa, Artificial Sequence
  Cyclic GFR-binding peptide
  MOD_RES (2), (2): Xaa is C or S
TXAPTKLEPISVLYL

SEQ ID NO: 9748 - protein, 26 aa, Artificial Sequence
  Cyclic GFR-binding peptide
  MOD_RES (6), (7): Xaa is C or S
KIPKAXXVPTELSPISMLYIDENEKV

SEQ ID NO: 9749 - protein, 23 aa, Artificial Sequence
  Cyclic GFR-binding peptide
  MOD_RES (6), (7): Xaa is C or S
AAPASXXVPARLSPISILYKDAA

SEQ ID NO: 9750 - protein, 25 aa, Artificial Sequence
  Cyclic GFR-binding peptide
  MOD_RES (6), (7): Xaa is C or S
YVPKPXXAPTKLSPISVLYIDDSSN

SEQ ID NO: 9751 - protein, 19 aa, Artificial Sequence
  Cyclic GFR-binding peptide
PTKLEPISVLYLDDMGVPT

SEQ ID NO: 9752 - protein, 22 aa, Artificial Sequence
  Cyclic GFR-binding peptide
  MOD_RES (6), (7): Xaa is C or S
ASASPXXVPQDLSPISILYIVG

SEQ ID NO: 9753 - protein, 18 aa, Artificial Sequence
  Cyclic GFR-binding peptide
  MOD_RES (4), (5): Xaa is C or S
PASXXVPARLNAISILYF

SEQ ID NO: 9754 - protein, 18 aa, Artificial Sequence
  Cyclic GFR-binding peptide
TELSPISMLYIDENEKVV

SEQ ID NO: 9755 - protein, 19 aa, Artificial Sequence
  Cyclic GFR-binding peptide
PTELEPISMLYLDENEKVV

SEQ ID NO: 9756 - protein, 15 aa, Artificial Sequence
  Cyclic GFR-binding peptide
SPISILYIDKGVVTY

SEQ ID NO: 9757 - protein, 13 aa, Artificial Sequence
  Cyclic GFR-binding peptide
VPTKLEPISVLYL

SEQ ID NO: 9758 - protein, 15 aa, Artificial Sequence
  Cyclic GFR-binding peptide
SPISILYKDAANNVV

SEQ ID NO: 9759 - protein, 13 aa, Artificial Sequence
  Cyclic GFR-binding peptide
VPARLSPISILYK

SEQ ID NO: 9760 - protein, 21 aa, Artificial Sequence
  Cyclic GFR-binding peptide
  MOD_RES (6), (7): Xaa is C or S
AVPKAXXAPTKLEPISVLYLD

SEQ ID NO: 9761 - protein, 23 aa, Artificial Sequence
  Cyclic GFR-binding peptide
  MOD_RES (6), (7): Xaa is C or S
KIPKAXXVPTELEPISMLYLDEN

SEQ ID NO: 9762 - protein, 15 aa, Artificial Sequence
  Cyclic GFR-binding peptide
  MOD_RES (1), (2): Xaa is C or S
XXVPTKLEPISVLYL

SEQ ID NO: 9763 - protein, 25 aa, Artificial Sequence
  Cyclic GFR-binding peptide
  MOD_RES (6), (7): Xaa is C or S
KASKAXXVPTKLNAISILYFDKGVV

SEQ ID NO: 9764 - protein, 17 aa, Artificial Sequence
  Cyclic GFR-binding peptide
  MOD_RES (3), (4): Xaa is C or S
APXXVPQALSPISILYI

SEQ ID NO: 9765 - protein, 15 aa, Artificial Sequence
  Cyclic GFR-binding peptide
  MOD_RES (1), (2): Xaa is C or S
XXVPARLNAISILYF

SEQ ID NO: 9766 - protein, 21 aa, Artificial Sequence
  Cyclic GFR-binding peptide
  MOD_RES (6), (7): Xaa is C or S
YVPKPXXAPTKLEPISVLYLD

SEQ ID NO: 9767 - protein, 19 aa, Artificial Sequence
  Cyclic GFR-binding peptide
SQDLSPISILYIIGKTPKI

SEQ ID NO: 9768 - protein, 18 aa, Artificial Sequence
  Cyclic GFR-binding peptide
  MOD_RES (4), (5): Xaa is C or S
GKAXXVPTKLSPISVLYI

SEQ ID NO: 9769 - protein, 18 aa, Artificial Sequence
  Cyclic GFR-binding peptide
TKLSPISVLYIDDMGVPT

SEQ ID NO: 9770 - protein, 26 aa, Artificial Sequence
  Cyclic GFR-binding peptide
  MOD_RES (6), (7): Xaa is C or S
KVGKAXXVPTKLSPISVLYIDDMGVP

SEQ ID NO: 9771 - protein, 21 aa, Artificial Sequence
  Cyclic GFR-binding peptide
  MOD_RES (6), (7): Xaa is C or S
ASASPXXVPQDLSPISILYIV

SEQ ID NO: 9772 - protein, 18 aa, Artificial Sequence
  Cyclic GFR-binding peptide
  MOD_RES (4), (5): Xaa is C or S
ASPXXVPQDLSPISILYI

SEQ ID NO: 9773 - protein, 16 aa, Artificial Sequence
  Cyclic GFR-binding peptide
LSPISILYIVGRTPKV

SEQ ID NO: 9774 - protein, 17 aa, Artificial Sequence
  Cyclic GFR-binding peptide
  MOD_RES (3), (4): Xaa is C or S
SPXXVPQDLSPISILYI

SEQ ID NO: 9775 - protein, 16 aa, Artificial Sequence
  Cyclic GFR-binding peptide
  MOD_RES (2), (3): Xaa is C or S
PXXVPQALSPISILYI

SEQ ID NO: 9776 - protein, 16 aa, Artificial Sequence
  Cyclic GFR-binding peptide
  MOD_RES (2), (3): Xaa is C or S
PXXAPTQLEPISVLYL

SEQ ID NO: 9777 - protein, 17 aa, Artificial Sequence
  Cyclic GFR-binding peptide
KLEPISVLYLDDMGVPT

SEQ ID NO: 9778 - protein, 24 aa, Artificial Sequence
  Cyclic GFR-binding peptide
  MOD_RES (6), (7): Xaa is C or S
ASAAPXXVPQALSPISILYIVGRK

SEQ ID NO: 9779 - protein, 18 aa, Artificial Sequence
  Cyclic GFR-binding peptide
TELEPISMLYLDEYDKVV

SEQ ID NO: 9780 - protein, 18 aa, Artificial Sequence
  Cyclic GFR-binding peptide
TKLEPISVLYLDSSNNVI

SEQ ID NO: 9781 - protein, 27 aa, Artificial Sequence
  Cyclic GFR-binding peptide
  MOD_RES (6), (7): Xaa is C or S
YVPKPXXAPTKLEPISVLYLDDSSNVI

SEQ ID NO: 9782 - protein, 17 aa, Artificial Sequence
  Cyclic GFR-binding peptide
  MOD_RES (3), (4): Xaa is C or S
KPXXAPTKLEPISVLYL

SEQ ID NO: 9783 - protein, 15 aa, Artificial Sequence
  Cyclic GFR-binding peptide
SPISILYIIGKTPKI

SEQ ID NO: 9784 - protein, 25 aa, Artificial Sequence
  Cyclic GFR-binding peptide
  MOD_RES (6), (7): Xaa is C or S
KIPKAXXVPTELSPISMLYIDENEK

SEQ ID NO: 9785 - protein, 22 aa, Artificial Sequence
  Cyclic GFR-binding peptide
  MOD_RES (6), (7): Xaa is C or S
ASASPXXVPQDLEPISILYLVG

SEQ ID NO: 9786 - protein, 24 aa, Artificial Sequence
  Cyclic GFR-binding peptide
  MOD_RES (6), (7): Xaa is C or S
KASKAXXVPTKLSPISILYKDKGV

SEQ ID NO: 9787 - protein, 17 aa, Artificial Sequence
  Cyclic GFR-binding peptide
KLSPISILYIDKGVVTY

SEQ ID NO: 9788 - protein, 16 aa, Artificial Sequence
  Cyclic GFR-binding peptide
LEPISMLYLDENEKVV

SEQ ID NO: 9789 - protein, 18 aa, Artificial Sequence
  Cyclic GFR-binding peptide
  MOD_RES (4), (5): Xaa is C or S
ASPXXVPQDLEPISILYL

SEQ ID NO: 9790 - protein, 16 aa, Artificial Sequence
  Cyclic GFR-binding peptide
LSPISVLYIDDSSNVI

SEQ ID NO: 9791 - protein, 20 aa, Artificial Sequence
  Cyclic GFR-binding peptide
  MOD_RES (6), (7): Xaa is C or S
ASAAPXXVPQALEPISILYL

SEQ ID NO: 9792 - protein, 17 aa, Artificial Sequence
  Cyclic GFR-binding peptide
ELEPISMLYLDENEKVV

SEQ ID NO: 9793 - protein, 16 aa, Artificial Sequence
  Cyclic GFR-binding peptide
LSPISILYIDKGVVTY

SEQ ID NO: 9794 - protein, 17 aa, Artificial Sequence
  Cyclic GFR-binding peptide
KLSPISVLYIDDSSNVI

SEQ ID NO: 9795 - protein, 17 aa, Artificial Sequence
  Cyclic GFR-binding peptide
QLSPISVLYIDDSSNVI

SEQ ID NO: 9796 - protein, 27 aa, Artificial Sequence
  Cyclic GFR-binding peptide
  MOD_RES (6), (7): Xaa is C or S
ASASPXXVPQDLEPISILYLVGRTPKV

SEQ ID NO: 9797 - protein, 20 aa, Artificial Sequence
  Cyclic GFR-binding peptide
  MOD_RES (6), (7): Xaa is C or S
KVGKAXXVPTKLSPISVLYI

SEQ ID NO: 9798 - protein, 26 aa, Artificial Sequence
  Cyclic GFR-binding peptide
  MOD_RES (6), (7): Xaa is C or S
SIPKAXXVPTELSPISMLYIDEYDKV

SEQ ID NO: 9799 - protein, 17 aa, Artificial Sequence
  Cyclic GFR-binding peptide
  MOD_RES (3), (4): Xaa is C or S
KAXXVPTELEPISMLYL

SEQ ID NO: 9800 - protein, 15 aa, Artificial Sequence
  Cyclic GFR-binding peptide
  MOD_RES (2), (2): Xaa is C or S
TXAPTKLSPISVLYI

SEQ ID NO: 9801 - protein, 24 aa, Artificial Sequence
  Cyclic GFR-binding peptide
  MOD_RES (6), (7): Xaa is C or S
YVPKPXXAPTKLSPISVLYIDDSS

SEQ ID NO: 9802 - protein, 15 aa, Artificial Sequence
  Cyclic GFR-binding peptide
EPISILYLVGRTPKV

SEQ ID NO: 9803 - protein, 24 aa, Artificial Sequence
  Cyclic GFR-binding peptide
  MOD_RES (6), (7): Xaa is C or S
TVPKPXXAPTQLEPISVLYLDDSS

SEQ ID NO: 9804 - protein, 13 aa, Artificial Sequence
  Cyclic GFR-binding peptide
APTKLEPISVLYL

SEQ ID NO: 9805 - protein, 26 aa, Artificial Sequence
  Cyclic GFR-binding peptide
  MOD_RES (6), (7): Xaa is C or S
ASAAPXXVPQALSPISILYIVGRKPK

SEQ ID NO: 9806 - protein, 22 aa, Artificial Sequence
  Cyclic GFR-binding peptide
  MOD_RES (6), (7): Xaa is C or S
AAPASXXVPARLSPISILYKDA

SEQ ID NO: 9807 - protein, 22 aa, Artificial Sequence
  Cyclic GFR-binding peptide
  MOD_RES (6), (7): Xaa is C or S
AAPASXXVPARLEPISILYLDA

SEQ ID NO: 9808 - protein, 16 aa, Artificial Sequence
  Cyclic GFR-binding peptide
LEPISVLYLDDMGVPT

SEQ ID NO: 9809 - protein, 15 aa, Artificial Sequence
  Cyclic GFR-binding peptide
  MOD_RES (1), (2): Xaa is C or S
XXVPTELSPISMLYI

SEQ ID NO: 9810 - protein, 26 aa, Artificial Sequence
  Cyclic GFR-binding peptide
  MOD_RES (6), (7): Xaa is C or S
AAPASXXVPARLSPISILYKDAANNV

SEQ ID NO: 9811 - protein, 21 aa, Artificial Sequence
  Cyclic GFR-binding peptide
  MOD_RES (6), (7): Xaa is C or S
AVPKAXXAPTKLSPISVLYID

SEQ ID NO: 9812 - protein, 19 aa, Artificial Sequence
  Cyclic GFR-binding peptide
PTKLSPISILYIDKGVVTY

SEQ ID NO: 9813 - protein, 26 aa, Artificial Sequence
  Cyclic GFR-binding peptide
  MOD_RES (6), (7): Xaa is C or S
YVPKPXXAPTKLEPISVLYLDDSSNV

SEQ ID NO: 9814 - protein, 14 aa, Artificial Sequence
  Cyclic GFR-binding peptide
  MOD_RES (1), (1): Xaa is C or S
XVPTELSPISMLYI

SEQ ID NO: 9815 - protein, 16 aa, Artificial Sequence
  Cyclic GFR-binding peptide
  MOD_RES (2), (3): Xaa is C or S
PXXVSQDLSPISILYI

SEQ ID NO: 9816 - protein, 23 aa, Artificial Sequence
  Cyclic GFR-binding peptide
  MOD_RES (6), (7): Xaa is C or S
TVPKPXXAPTQLEPISVLYLDDS

SEQ ID NO: 9817 - protein, 14 aa, Artificial Sequence
  Cyclic GFR-binding peptide
  MOD_RES (1), (1): Xaa is C or S
XAPTKLEPISVLYL

SEQ ID NO: 9818 - protein, 18 aa, Artificial Sequence
  Cyclic GFR-binding peptide
  MOD_RES (4), (5): Xaa is C or S
SKAXXVPTKLSPISILYK

SEQ ID NO: 9819 - protein, 18 aa, Artificial Sequence
  Cyclic GFR-binding peptide
  MOD_RES (4), (5): Xaa is C or S
SKAXXVPTKLSPISILYI

SEQ ID NO: 9820 - protein, 15 aa, Artificial Sequence
  Cyclic GFR-binding peptide
SPISILYIVGRKPKV

SEQ ID NO: 9821 - protein, 27 aa, Artificial Sequence
  Cyclic GFR-binding peptide
  MOD_RES (6), (7): Xaa is C or S
ASASPXXVPQDLSPISILYIVGRTPKV

SEQ ID NO: 9822 - protein, 14 aa, Artificial Sequence
  Cyclic GFR-binding peptide
  MOD_RES (1), (1): Xaa is C or S
XVPARLSPISILYK

SEQ ID NO: 9823 - protein, 20 aa, Artificial Sequence
  Cyclic GFR-binding peptide
  MOD_RES (6), (7): Xaa is C or S
KIPKAXXVPTELEPISMLYL

SEQ ID NO: 9824 - protein, 16 aa, Artificial Sequence
  Cyclic GFR-binding peptide
  MOD_RES (2), (3): Xaa is C or S
AXXVPTKLEPISVLYL

SEQ ID NO: 9825 - protein, 24 aa, Artificial Sequence
  Cyclic GFR-binding peptide
  MOD_RES (6), (7): Xaa is C or S
YVPKPXXAPTKLEPISVLYLDDSS

SEQ ID NO: 9826 - protein, 26 aa, Artificial Sequence
  Cyclic GFR-binding peptide
  MOD_RES (6), (7): Xaa is C or S
KASKAXXVPTKLSPISILYIDKGVVT

SEQ ID NO: 9827 - protein, 26 aa, Artificial Sequence
  Cyclic GFR-binding peptide
  MOD_RES (6), (7): Xaa is C or S
SIPKAXXVPTELEPISMLYLDEYDKV

SEQ ID NO: 9828 - protein, 25 aa, Artificial Sequence
  Cyclic GFR-binding peptide
  MOD_RES (6), (7): Xaa is C or S
ASASPXXVSQDLEPISILYLIGKTP

SEQ ID NO: 9829 - protein, 18 aa, Artificial Sequence
  Cyclic GFR-binding peptide
  MOD_RES (4), (5): Xaa is C or S
PKPXXAPTQLEPISVLYL

SEQ ID NO: 9830 - protein, 17 aa, Artificial Sequence
  Cyclic GFR-binding peptide
  MOD_RES (3), (4): Xaa is C or S
KAXXVPTKLNAISILYF

SEQ ID NO: 9831 - protein, 20 aa, Artificial Sequence
  Cyclic GFR-binding peptide
  MOD_RES (6), (7): Xaa is C or S
AAPASXXVPARLSPISILYK

SEQ ID NO: 9832 - protein, 16 aa, Artificial Sequence
  Cyclic GFR-binding peptide
LNAISILYFDAANNVV

SEQ ID NO: 9833 - protein, 16 aa, Artificial Sequence
  Cyclic GFR-binding peptide
  MOD_RES (2), (3): Xaa is C or S
SXXVPARLEPISILYL

SEQ ID NO: 9834 - protein, 19 aa, Artificial Sequence
  Cyclic GFR-binding peptide
  MOD_RES (6), (6): Xaa is C or S
VTKPTXAPTKLEPISVLYL

SEQ ID NO: 9835 - protein, 26 aa, Artificial Sequence
  Cyclic GFR-binding peptide
  MOD_RES (6), (7): Xaa is C or S
ASAAPXXVPQALEPISILYLVGRKPK

SEQ ID NO: 9836 - protein, 15 aa, Artificial Sequence
  Cyclic GFR-binding peptide
SPISVLYIDDSSNVI

SEQ ID NO: 9837 - protein, 17 aa, Artificial Sequence
  Cyclic GFR-binding peptide
  MOD_RES (3), (4): Xaa is C or S
SPXXVSQDLSPISILYI

SEQ ID NO: 9838 - protein, 21 aa, Artificial Sequence
  Cyclic GFR-binding peptide
  MOD_RES (6), (7): Xaa is C or S
ASASPXXVSQDLEPISILYLI

SEQ ID NO: 9839 - protein, 21 aa, Artificial Sequence
  Cyclic GFR-binding peptide
  MOD_RES (6), (7): Xaa is C or S
ASASPXXVPQDLEPISILYLV

SEQ ID NO: 9840 - protein, 21 aa, Artificial Sequence
  Cyclic GFR-binding peptide
  MOD_RES (6), (7): Xaa is C or S
KVGKAXXVPTKLEPISVLYLD

SEQ ID NO: 9841 - protein, 16 aa, Artificial Sequence
  Cyclic GFR-binding peptide
LSPISILYKDAANNVV

SEQ ID NO: 9842 - protein, 20 aa, Artificial Sequence
  Cyclic GFR-binding peptide
  MOD_RES (6), (7): Xaa is C or S
AAPASXXVPARLNAISILYF

SEQ ID NO: 9843 - protein, 26 aa, Artificial Sequence
  Cyclic GFR-binding peptide
  MOD_RES (6), (7): Xaa is C or S
ASASPXXVSQDLSPISILYIIGKTPK

SEQ ID NO: 9844 - protein, 18 aa, Artificial Sequence
  Cyclic GFR-binding peptide
  MOD_RES (4), (5): Xaa is C or S
ASPXXVSQDLEPISILYL

SEQ ID NO: 9845 - protein, 19 aa, Artificial Sequence
  Cyclic GFR-binding peptide
  MOD_RES (5), (6): Xaa is C or S
IPKAXXVPTELSPISMLYI

SEQ ID NO: 9846 - protein, 19 aa, Artificial Sequence
  Cyclic GFR-binding peptide
PTKLEPISVLYLDSSNNVI

SEQ ID NO: 9847 - protein, 27 aa, Artificial Sequence
  Cyclic GFR-binding peptide
  MOD_RES (6), (7): Xaa is C or S
ASASPXXVSQDLEPISILYLIGKTPKI

SEQ ID NO: 9848 - protein, 17 aa, Artificial Sequence
  Cyclic GFR-binding peptide
  MOD_RES (3), (4): Xaa is C or S
ASXXVPARLSPISILYK

SEQ ID NO: 9849 - protein, 17 aa, Artificial Sequence
  Cyclic GFR-binding peptide
ELSPISMLYIDENEKVV

SEQ ID NO: 9850 - protein, 16 aa, Artificial Sequence
  Cyclic GFR-binding peptide
  MOD_RES (2), (3): Xaa is C or S
AXXVPTELSPISMLYI

SEQ ID NO: 9851 - protein, 23 aa, Artificial Sequence
  Cyclic GFR-binding peptide
  MOD_RES (6), (7): Xaa is C or S
YVPKPXXAPTKLSPISVLYIDDS

SEQ ID NO: 9852 - protein, 15 aa, Artificial Sequence
  Cyclic GFR-binding peptide
SPISILYKDKGVVTY

SEQ ID NO: 9853 - protein, 19 aa, Artificial Sequence
  Cyclic GFR-binding peptide
SQDLEPISILYLIGKTPKI

SEQ ID NO: 9854 - protein, 18 aa, Artificial Sequence
  Cyclic GFR-binding peptide
TELSPISMLYIDEYDKVV

SEQ ID NO: 9855 - protein, 15 aa, Artificial Sequence
  Cyclic GFR-binding peptide
EPISILYLVGRKPKV

SEQ ID NO: 9856 - protein, 23 aa, Artificial Sequence
  Cyclic GFR-binding peptide
  MOD_RES (6), (7): Xaa is C or S
KASKAXXVPTKLSPISILYIDKG

SEQ ID NO: 9857 - protein, 14 aa, Artificial Sequence
  Cyclic GFR-binding peptide
  MOD_RES (1), (1): Xaa is C or S
XVSQDLSPISILYI

SEQ ID NO: 9858 - protein, 13 aa, Artificial Sequence
  Cyclic GFR-binding peptide
VPTELSPISMLYI

SEQ ID NO: 9859 - protein, 27 aa, Artificial Sequence
  Cyclic GFR-binding peptide
  MOD_RES (6), (7): Xaa is C or S
SIPKAXXVPTELSPISMLYIDEYDKVV

SEQ ID NO: 9860 - protein, 26 aa, Artificial Sequence
  Cyclic GFR-binding peptide
  MOD_RES (6), (7): Xaa is C or S
TVPKPXXAPTQLEPISVLYLDDSSNV

SEQ ID NO: 9861 - protein, 21 aa, Artificial Sequence
  Cyclic GFR-binding peptide
  MOD_RES (7), (7): Xaa is C or S
HVTKPTXAPTKLEPISVLYLD

SEQ ID NO: 9862 - protein, 13 aa, Artificial Sequence
  Cyclic GFR-binding peptide
VPTKLSPISVLYI

SEQ ID NO: 9863 - protein, 18 aa, Artificial Sequence
  Cyclic GFR-binding peptide
TKLSPISVLYIDSSNNVI

SEQ ID NO: 9864 - protein, 17 aa, Artificial Sequence
  Cyclic GFR-binding peptide
KLNAISILYFDKGVVTY

SEQ ID NO: 9865 - protein, 19 aa, Artificial Sequence
  Cyclic GFR-binding peptide
  MOD_RES (5), (6): Xaa is C or S
VPKAXXAPTKLSPISVLYI

SEQ ID NO: 9866 - protein, 16 aa, Artificial Sequence
  Cyclic GFR-binding peptide
  MOD_RES (2), (3): Xaa is C or S
AXXVPTKLSPISILYI

SEQ ID NO: 9867 - protein, 18 aa, Artificial Sequence
  Cyclic GFR-binding peptide
TELEPISMLYLDENEKVV

SEQ ID NO: 9868 - protein, 16 aa, Artificial Sequence
  Cyclic GFR-binding peptide
  MOD_RES (2), (3): Xaa is C or S
AXXVPTKLSPISILYK

SEQ ID NO: 9869 - protein, 18 aa, Artificial Sequence
  Cyclic GFR-binding peptide
TKLSPISILYIDKGVVTY

SEQ ID NO: 9870 - protein, 23 aa, Artificial Sequence
  Cyclic GFR-binding peptide
  MOD_RES (6), (7): Xaa is C or S
AVPKAXXAPTKLEPISVLYLDSS

SEQ ID NO: 9871 - protein, 22 aa, Artificial Sequence
  Cyclic GFR-binding peptide
  MOD_RES (6), (7): Xaa is C or S
AAPASXXVPARLNAISILYFDA

SEQ ID NO: 9872 - protein, 13 aa, Artificial Sequence
  Cyclic GFR-binding peptide
VPQALEPISILYL

SEQ ID NO: 9873 - protein, 15 aa, Artificial Sequence
  Cyclic GFR-binding peptide
SPISMLYIDENEKVV

SEQ ID NO: 9874 - protein, 15 aa, Artificial Sequence
  Cyclic GFR-binding peptide
  MOD_RES (1), (2): Xaa is C or S
XXVPARLEPISILYL

SEQ ID NO: 9875 - protein, 22 aa, Artificial Sequence
  Cyclic GFR-binding peptide
  MOD_RES (6), (7): Xaa is C or S
KIPKAXXVPTELSPISMLYIDE

SEQ ID NO: 9876 - protein, 23 aa, Artificial Sequence
  Cyclic GFR-binding peptide
  MOD_RES (6), (7): Xaa is C or S
KVGKAXXVPTKLEPISVLYLDDM

SEQ ID NO: 9877 - protein, 26 aa, Artificial Sequence
  Cyclic GFR-binding peptide
  MOD_RES (7), (7): Xaa is C or S
HVTKPTXAPTKLEPISVLYLDDSSNV

SEQ ID NO: 9878 - protein, 18 aa, Artificial Sequence
  Cyclic GFR-binding peptide
  MOD_RES (4), (5): Xaa is C or S
PKAXXAPTKLEPISVLYL

SEQ ID NO: 9879 - protein, 19 aa, Artificial Sequence
  Cyclic GFR-binding peptide
  MOD_RES (5), (6): Xaa is C or S
ASKAXXVPTKLSPISILYK

SEQ ID NO: 9880 - protein, 26 aa, Artificial Sequence
  Cyclic GFR-binding peptide
  MOD_RES (6), (7): Xaa is C or S
KVGKAXXVPTKLEPISVLYLDDMGVP

SEQ ID NO: 9881 - protein, 19 aa, Artificial Sequence
  Cyclic GFR-binding peptide
  MOD_RES (5), (6): Xaa is C or S
ASKAXXVPTKLSPISILYI

SEQ ID NO: 9882 - protein, 27 aa, Artificial Sequence
  Cyclic GFR-binding peptide
  MOD_RES (6), (7): Xaa is C or S
KASKAXXVPTKLSPISILYIDKGVVTY

SEQ ID NO: 9883 - protein, 16 aa, Artificial Sequence
  Cyclic GFR-binding peptide
  MOD_RES (2), (3): Xaa is C or S
AXXAPTKLSPISVLYI

SEQ ID NO: 9884 - protein, 25 aa, Artificial Sequence
  Cyclic GFR-binding peptide
  MOD_RES (6), (7): Xaa is C or S
AAPASXXVPARLSPISILYKDAANN

SEQ ID NO: 9885 - protein, 23 aa, Artificial Sequence
  Cyclic GFR-binding peptide
  MOD_RES (6), (7): Xaa is C or S
ASAAPXXVPQALEPISILYLVGR

SEQ ID NO: 9886 - protein, 17 aa, Artificial Sequence
  Cyclic GFR-binding peptide
ALSPISILYIVGRKPKV

SEQ ID NO: 9887 - protein, 18 aa, Artificial Sequence
  Cyclic GFR-binding peptide
QDLEPISILYLVGRTPKV

SEQ ID NO: 9888 - protein, 27 aa, Artificial Sequence
  Cyclic GFR-binding peptide
  MOD_RES (6), (7): Xaa is C or S
AVPKAXXAPTKLEPISVLYLDSSNNVI

SEQ ID NO: 9889 - protein, 16 aa, Artificial Sequence
  Cyclic GFR-binding peptide
  MOD_RES (2), (3): Xaa is C or S
PXXVPQDLSPISILYI

SEQ ID NO: 9890 - protein, 16 aa, Artificial Sequence
  Cyclic GFR-binding peptide
LSPISVLYIDDMGVPT

SEQ ID NO: 9891 - protein, 15 aa, Artificial Sequence
  Cyclic GFR-binding peptide
  MOD_RES (1), (2): Xaa is C or S
XXVSQDLSPISILYI

SEQ ID NO: 9892 - protein, 18 aa, Artificial Sequence
  Cyclic GFR-binding peptide
  MOD_RES (4), (5): Xaa is C or S
PASXXVPARLSPISILYK

SEQ ID NO: 9893 - protein, 15 aa, Artificial Sequence
  Cyclic GFR-binding peptide
EPISILYLIGKTPKI

SEQ ID NO: 9894 - protein, 25 aa, Artificial Sequence
  Cyclic GFR-binding peptide
  MOD_RES (6), (7): Xaa is C or S
TVPKPXXAPTQLSPISVLYIDDSSN

SEQ ID NO: 9895 - protein, 17 aa, Artificial Sequence
  Cyclic GFR-binding peptide
  MOD_RES (4), (4): Xaa is C or S
KPTXAPTKLSPISVLYI

SEQ ID NO: 9896 - protein, 26 aa, Artificial Sequence
  Cyclic GFR-binding peptide
  MOD_RES (7), (7): Xaa is C or S
HVTKPTXAPTKLSPISVLYIDDSSNV

SEQ ID NO: 9897 - protein, 27 aa, Artificial Sequence
  Cyclic GFR-binding peptide
  MOD_RES (6), (7): Xaa is C or S
ASAAPXXVPQALSPISILYIVGRKPKV

SEQ ID NO: 9898 - protein, 25 aa, Artificial Sequence
  Cyclic GFR-binding peptide
  MOD_RES (6), (7): Xaa is C or S
KASKAXXVPTKLSPISILYIDKGVV

SEQ ID NO: 9899 - protein, 19 aa, Artificial Sequence
  Cyclic GFR-binding peptide
PTKLSPISVLYIDDMGVPT

SEQ ID NO: 9900 - protein, 20 aa, Artificial Sequence
  Cyclic GFR-binding peptide
  MOD_RES (6), (7): Xaa is C or S
AVPKAXXAPTKLEPISVLYL

SEQ ID NO: 9901 - protein, 15 aa, Artificial Sequence
  Cyclic GFR-binding peptide
  MOD_RES (1), (2): Xaa is C or S
XXVPQALSPISILYI

SEQ ID NO: 9902 - protein, 23 aa, Artificial Sequence
  Cyclic GFR-binding peptide
  MOD_RES (6), (7): Xaa is C or S
ASASPXXVPQDLSPISILYIVGR

SEQ ID NO: 9903 - protein, 21 aa, Artificial Sequence
  Cyclic GFR-binding peptide
  MOD_RES (6), (7): Xaa is C or S
SIPKAXXVPTELEPISMLYLD

SEQ ID NO: 9904 - protein, 26 aa, Artificial Sequence
  Cyclic GFR-binding peptide
  MOD_RES (6), (7): Xaa is C or S
KIPKAXXVPTELEPISMLYLDENEKV

SEQ ID NO: 9905 - protein, 18 aa, Artificial Sequence
  Cyclic GFR-binding peptide
TKLEPISVLYLDDSSNVI

SEQ ID NO: 9906 - protein, 14 aa, Artificial Sequence
  Cyclic GFR-binding peptide
  MOD_RES (1), (1): Xaa is C or S
XVPARLEPISILYL

SEQ ID NO: 9907 - protein, 18 aa, Artificial Sequence
  Cyclic GFR-binding peptide
  MOD_RES (4), (5): Xaa is C or S
AAPXXVPQALSPISILYI

SEQ ID NO: 9908 - protein, 18 aa, Artificial Sequence
  Cyclic GFR-binding peptide
TQLEPISVLYLDDSSNVI

SEQ ID NO: 9909 - protein, 26 aa, Artificial Sequence
  Cyclic GFR-binding peptide
  MOD_RES (6), (7): Xaa is C or S
KASKAXXVPTKLNAISILYFDKGVVT

SEQ ID NO: 9910 - protein, 23 aa, Artificial Sequence
  Cyclic GFR-binding peptide
  MOD_RES (6), (7): Xaa is C or S
AAPASXXVPARLNAISILYFDAA

SEQ ID NO: 9911 - protein, 18 aa, Artificial Sequence
  Cyclic GFR-binding peptide
  MOD_RES (4), (5): Xaa is C or S
PKPXXAPTQLSPISVLYI

SEQ ID NO: 9912 - protein, 13 aa, Artificial Sequence
  Cyclic GFR-binding peptide
APTQLSPISVLYI

SEQ ID NO: 9913 - protein, 21 aa, Artificial Sequence
  Cyclic GFR-binding peptide
  MOD_RES (6), (7): Xaa is C or S
TVPKPXXAPTQLEPISVLYLD

SEQ ID NO: 9914 - protein, 13 aa, Artificial Sequence
  Cyclic GFR-binding peptide
VPTKLSPISILYI

SEQ ID NO: 9915 - protein, 13 aa, Artificial Sequence
  Cyclic GFR-binding peptide
VPTKLSPISILYK

SEQ ID NO: 9916 - protein, 27 aa, Artificial Sequence
  Cyclic GFR-binding peptide
  MOD_RES (6), (7): Xaa is C or S
KASKAXXVPTKLNAISILYFDKGVVTY

SEQ ID NO: 9917 - protein, 24 aa, Artificial Sequence
  Cyclic GFR-binding peptide
  MOD_RES (6), (7): Xaa is C or S
KASKAXXVPTKLNAISILYFDKGV

SEQ ID NO: 9918 - protein, 23 aa, Artificial Sequence
  Cyclic GFR-binding peptide
  MOD_RES (6), (7): Xaa is C or S
SIPKAXXVPTELSPISMLYIDEY

SEQ ID NO: 9919 - protein, 14 aa, Artificial Sequence
  Cyclic GFR-binding peptide
  MOD_RES (1), (1): Xaa is C or S
XVPQDLSPISILYI

SEQ ID NO: 9920 - protein, 13 aa, Artificial Sequence
  Cyclic GFR-binding peptide
VSQDLEPISILYL

SEQ ID NO: 9921 - protein, 27 aa, Artificial Sequence
  Cyclic GFR-binding peptide
  MOD_RES (6), (7): Xaa is C or S
TVPKPXXAPTQLSPISVLYIDDSSNVI

SEQ ID NO: 9922 - protein, 18 aa, Artificial Sequence
  Cyclic GFR-binding peptide
  MOD_RES (5), (5): Xaa is C or S
TKPTXAPTKLSPISVLYI

SEQ ID NO: 9923 - protein, 17 aa, Artificial Sequence
  Cyclic GFR-binding peptide
ELSPISMLYIDEYDKVV

SEQ ID NO: 9924 - protein, 19 aa, Artificial Sequence
  Cyclic GFR-binding peptide
PQALSPISILYIVGRKPKV

SEQ ID NO: 9925 - protein, 15 aa, Artificial Sequence
  Cyclic GFR-binding peptide
  MOD_RES (1), (2): Xaa is C or S
XXVPQDLSPISILYI

SEQ ID NO: 9926 - protein, 20 aa, Artificial Sequence
  Cyclic GFR-binding peptide
  MOD_RES (6), (7): Xaa is C or S
ASAAPXXVPQALSPISILYI

SEQ ID NO: 9927 - protein, 16 aa, Artificial Sequence
  Cyclic GFR-binding peptide
LEPISMLYLDEYDKVV

SEQ ID NO: 9928 - protein, 16 aa, Artificial Sequence
  Cyclic GFR-binding peptide
  MOD_RES (2), (3): Xaa is C or S
AXXVPTKLSPISVLYI

SEQ ID NO: 9929 - protein, 18 aa, Artificial Sequence
  Cyclic GFR-binding peptide
QDLEPISILYLIGKTPKI

SEQ ID NO: 9930 - protein, 19 aa, Artificial Sequence
  Cyclic GFR-binding peptide
  MOD_RES (5), (6): Xaa is C or S
SASPXXVSQDLEPISILYL

SEQ ID NO: 9931 - protein, 17 aa, Artificial Sequence
  Cyclic GFR-binding peptide
  MOD_RES (3), (4): Xaa is C or S
KPXXAPTKLSPISVLYI

SEQ ID NO: 9932 - protein, 25 aa, Artificial Sequence
  Cyclic GFR-binding peptide
  MOD_RES (6), (7): Xaa is C or S
TVPKPXXAPTQLEPISVLYLDDSSN

SEQ ID NO: 9933 - protein, 21 aa, Artificial Sequence
  Cyclic GFR-binding peptide
  MOD_RES (6), (7): Xaa is C or S
YVPKPXXAPTKLSPISVLYID

SEQ ID NO: 9934 - protein, 17 aa, Artificial Sequence
  Cyclic GFR-binding peptide
  MOD_RES (3), (4): Xaa is C or S
KPXXAPTQLSPISVLYI

SEQ ID NO: 9935 - protein, 23 aa, Artificial Sequence
  Cyclic GFR-binding peptide
  MOD_RES (6), (7): Xaa is C or S
TVPKPXXAPTQLSPISVLYIDDS

SEQ ID NO: 9936 - protein, 14 aa, Artificial Sequence
  Cyclic GFR-binding peptide
  MOD_RES (1), (1): Xaa is C or S
XVPARLNAISILYF

SEQ ID NO: 9937 - protein, 25 aa, Artificial Sequence
  Cyclic GFR-binding peptide
  MOD_RES (6), (7): Xaa is C or S
AAPASXXVPARLNAISILYFDAANN

SEQ ID NO: 9938 - protein, 14 aa, Artificial Sequence
  Cyclic GFR-binding peptide
  MOD_RES (1), (1): Xaa is C or S
XVPQALSPISILYI

SEQ ID NO: 9939 - protein, 27 aa, Artificial Sequence
  Cyclic GFR-binding peptide
  MOD_RES (6), (7): Xaa is C or S
KASKAXXVPTKLSPISILYKDKGVVTY

SEQ ID NO: 9940 - protein, 27 aa, Artificial Sequence
  Cyclic GFR-binding peptide
  MOD_RES (6), (7): Xaa is C or S
KVGKAXXVPTKLSPISVLYIDDMGVPT

SEQ ID NO: 9941 - protein, 18 aa, Artificial Sequence
  Cyclic GFR-binding peptide
  MOD_RES (4), (5): Xaa is C or S
PKPXXAPTKLSPISVLYI

SEQ ID NO: 9942 - protein, 19 aa, Artificial Sequence
  Cyclic GFR-binding peptide
PTELEPISMLYLDEYDKVV

SEQ ID NO: 9943 - protein, 25 aa, Artificial Sequence
  Cyclic GFR-binding peptide
  MOD_RES (6), (7): Xaa is C or S
SIPKAXXVPTELEPISMLYLDEYDK

SEQ ID NO: 9944 - protein, 16 aa, Artificial Sequence
  Cyclic GFR-binding peptide
LSPISILYIIGKTPKI

SEQ ID NO: 9945 - protein, 13 aa, Artificial Sequence
  Cyclic GFR-binding peptide
APTKLSPISVLYI

SEQ ID NO: 9946 - protein, 24 aa, Artificial Sequence
  Cyclic GFR-binding peptide
  MOD_RES (6), (7): Xaa is C or S
ASASPXXVSQDLSPISILYIIGKT

SEQ ID NO: 9947 - protein, 17 aa, Artificial Sequence
  Cyclic GFR-binding peptide
KLSPISILYKDKGVVTY

SEQ ID NO: 9948 - protein, 15 aa, Artificial Sequence
  Cyclic GFR-binding peptide
EPISVLYLDDMGVPT

SEQ ID NO: 9949 - protein, 20 aa, Artificial Sequence
  Cyclic GFR-binding peptide
  MOD_RES (6), (7): Xaa is C or S
YVPKPXXAPTKLEPISVLYL

SEQ ID NO: 9950 - protein, 26 aa, Artificial Sequence
  Cyclic GFR-binding peptide
  MOD_RES (6), (7): Xaa is C or S
ASASPXXVPQDLSPISILYIVGRTPK

SEQ ID NO: 9951 - protein, 25 aa, Artificial Sequence
  Cyclic GFR-binding peptide
  MOD_RES (19), (19): Xaa is C or S
NSSDDFYLVNIPSLKTPAXTPKTVH

SEQ ID NO: 9952 - protein, 25 aa, Artificial Sequence
  Cyclic GFR-binding peptide
  MOD_RES (19), (20): Xaa is C or S
NNASDFYLINIPSLRTPVXXTPPTS

SEQ ID NO: 9953 - protein, 17 aa, Artificial Sequence
  Cyclic GFR-binding peptide
IVNSSDDFYLVNIPSLK

SEQ ID NO: 9954 - protein, 27 aa, Artificial Sequence
  Cyclic GFR-binding peptide
  MOD_RES (21), (22): Xaa is C or S
TPVGMDDFYLVNIPSLKTPVXXAKGVK

SEQ ID NO: 9955 - protein, 16 aa, Artificial Sequence
  Cyclic GFR-binding peptide
VVKENEDFYLMNIPSL

SEQ ID NO: 9956 - protein, 13 aa, Artificial Sequence
  Cyclic GFR-binding peptide
FYLINIPSLRTPV

SEQ ID NO: 9957 - protein, 17 aa, Artificial Sequence
  Cyclic GFR-binding peptide
LLVRGNDFYLMNIPSTK

SEQ ID NO: 9958 - protein, 25 aa, Artificial Sequence
  Cyclic GFR-binding peptide
  MOD_RES (19), (20): Xaa is C or S
VVGKDFYLINIPSLKTPVXXAKSAK

SEQ ID NO: 9959 - protein, 17 aa, Artificial Sequence
  Cyclic GFR-binding peptide
  MOD_RES (14), (15): Xaa is C or S
FYLVNIPSLKTPAXXAK

SEQ ID NO: 9960 - protein, 15 aa, Artificial Sequence
  Cyclic GFR-binding peptide
  MOD_RES (14), (15): Xaa is C or S
FYLMNIPSLETPVXX

SEQ ID NO: 9961 - protein, 16 aa, Artificial Sequence
  Cyclic GFR-binding peptide
  MOD_RES (14), (15): Xaa is C or S
FYLINIPSLRTPVXXT

SEQ ID NO: 9962 - protein, 21 aa, Artificial Sequence
  Cyclic GFR-binding peptide
  MOD_RES (15), (16): Xaa is C or S
DFYLMNIPSLETPVXXAKPIS

SEQ ID NO: 9963 - protein, 27 aa, Artificial Sequence
  Cyclic GFR-binding peptide
  MOD_RES (21), (22): Xaa is C or S
VVNNAADFYLINIPSLRAPVXXSAPAA

SEQ ID NO: 9964 - protein, 22 aa, Artificial Sequence
  Cyclic GFR-binding peptide
  MOD_RES (16), (17): Xaa is C or S
ADFYLINIPSLRAPVXXSAPAA

SEQ ID NO: 9965 - protein, 24 aa, Artificial Sequence
  Cyclic GFR-binding peptide
  MOD_RES (18), (19): Xaa is C or S
SSDDFYLVNIPSLKTPAXXPKPVH

SEQ ID NO: 9966 - protein, 19 aa, Artificial Sequence
  Cyclic GFR-binding peptide
VVKENEDFYLMNIPSLETP

SEQ ID NO: 9967 - protein, 27 aa, Artificial Sequence
  Cyclic GFR-binding peptide
  MOD_RES (21), (22): Xaa is C or S
VVNNASDFYLINIPSLRTPVXXTPPTS

SEQ ID NO: 9968 - protein, 13 aa, Artificial Sequence
  Cyclic GFR-binding peptide
FYLINIPSLKTPV

SEQ ID NO: 9969 - protein, 19 aa, Artificial Sequence
  Cyclic GFR-binding peptide
  MOD_RES (14), (14): Xaa is C or S
FYLVNIPSLKTPAXTPKTV

SEQ ID NO: 9970 - protein, 25 aa, Artificial Sequence
  Cyclic GFR-binding peptide
  MOD_RES (19), (20): Xaa is C or S
NNSSDFYLVNIPSLKTPAXXAKPVA

SEQ ID NO: 9971 - protein, 13 aa, Artificial Sequence
  Cyclic GFR-binding peptide
FYLVNIPSLQTPA

SEQ ID NO: 9972 - protein, 20 aa, Artificial Sequence
  Cyclic GFR-binding peptide
  MOD_RES (14), (15): Xaa is C or S
FYLVNIPSLQTPAXXPKPVT

SEQ ID NO: 9973 - protein, 23 aa, Artificial Sequence
  Cyclic GFR-binding peptide
  MOD_RES (17), (18): Xaa is C or S
GKDFYLINIPSLKTPVXXAKSAK

SEQ ID NO: 9974 - protein, 20 aa, Artificial Sequence
  Cyclic GFR-binding peptide
  MOD_RES (14), (15): Xaa is C or S
FYLVNIPSLKTPVXXAKGVK

SEQ ID NO: 9975 - protein, 16 aa, Artificial Sequence
  Cyclic GFR-binding peptide
TPVGMDDFYLVNIPSL

SEQ ID NO: 9976 - protein, 21 aa, Artificial Sequence
  Cyclic GFR-binding peptide
  MOD_RES (15), (16): Xaa is C or S
DFYLMNIPSTKVPAXXTSPVR

SEQ ID NO: 9977 - protein, 14 aa, Artificial Sequence
  Cyclic GFR-binding peptide
  MOD_RES (14), (14): Xaa is C or S
FYLVNIPSLKTPVX

SEQ ID NO: 9978 - protein, 22 aa, Artificial Sequence
  Cyclic GFR-binding peptide
  MOD_RES (16), (16): Xaa is C or S
DDFYLVNIPSLKTPAXTPKTVH

SEQ ID NO: 9979 - protein, 23 aa, Artificial Sequence
  Cyclic GFR-binding peptide
  MOD_RES (17), (18): Xaa is C or S
SDDFYLVNIPSLKTPAXXPKPVY

SEQ ID NO: 9980 - protein, 17 aa, Artificial Sequence
  Cyclic GFR-binding peptide
TPVGMDDFYLVNIPSLK

SEQ ID NO: 9981 - protein, 18 aa, Artificial Sequence
  Cyclic GFR-binding peptide
  MOD_RES (14), (14): Xaa is C or S
FYLVNIPSLKTPAXTPKT

SEQ ID NO: 9982 - protein, 20 aa, Artificial Sequence
  Cyclic GFR-binding peptide
  MOD_RES (14), (15): Xaa is C or S
FYLMNIPSLETPVXXAKPIK

SEQ ID NO: 9983 - protein, 15 aa, Artificial Sequence
  Cyclic GFR-binding peptide
  MOD_RES (14), (15): Xaa is C or S
FYLINIPSLRAPVXX

SEQ ID NO: 9984 - protein, 25 aa, Artificial Sequence
  Cyclic GFR-binding peptide
  MOD_RES (19), (20): Xaa is C or S
KENEDFYLMNIPSLETPVXXAKPIK

SEQ ID NO: 9985 - protein, 26 aa, Artificial Sequence
  Cyclic GFR-binding peptide
  MOD_RES (20), (21): Xaa is C or S
PVGMDDFYLVNIPSLKTPVXXAKGVK

SEQ ID NO: 9986 - protein, 24 aa, Artificial Sequence
  Cyclic GFR-binding peptide
  MOD_RES (18), (19): Xaa is C or S
SSDDFYLVNIPSLQTPAXXPKPVT

SEQ ID NO: 9987 - protein, 27 aa, Artificial Sequence
  Cyclic GFR-binding peptide
  MOD_RES (21), (21): Xaa is C or S
IVNSSDDFYLVNIPSLKTPAXTPKTVH

SEQ ID NO: 9988 - protein, 17 aa, Artificial Sequence
  Cyclic GFR-binding peptide
  MOD_RES (14), (15): Xaa is C or S
FYLVNIPSLQTPAXXPK

SEQ ID NO: 9989 - protein, 15 aa, Artificial Sequence
  Cyclic GFR-binding peptide
LLVRGNDFYLMNIPS

SEQ ID NO: 9990 - protein, 23 aa, Artificial Sequence
  Cyclic GFR-binding peptide
  MOD_RES (17), (18): Xaa is C or S
SDDFYLVNIPSLKTPAXXPKPVH

SEQ ID NO: 9991 - protein, 27 aa, Artificial Sequence
  Cyclic GFR-binding peptide
  MOD_RES (21), (22): Xaa is C or S
VVKENEDFYLMNIPSLETPVXXAKPIK

SEQ ID NO: 9992 - protein, 18 aa, Artificial Sequence
  Cyclic GFR-binding peptide
  MOD_RES (14), (15): Xaa is C or S
FYLMNIPSTKVPAXXTSP

SEQ ID NO: 9993 - protein, 15 aa, Artificial Sequence
  Cyclic GFR-binding peptide
YTVVGKDFYLINIPS

SEQ ID NO: 9994 - protein, 18 aa, Artificial Sequence
  Cyclic GFR-binding peptide
  MOD_RES (14), (15): Xaa is C or S
FYLINIPSLRTPVXXTPP

SEQ ID NO: 9995 - protein, 18 aa, Artificial Sequence
  Cyclic GFR-binding peptide
  MOD_RES (14), (15): Xaa is C or S
FYLVNIPSLQTPAXXPKP

SEQ ID NO: 9996 - protein, 16 aa, Artificial Sequence
  Cyclic GFR-binding peptide
  MOD_RES (14), (15): Xaa is C or S
FYLVNIPSLKTPAXXA

SEQ ID NO: 9997 - protein, 26 aa, Artificial Sequence
  Cyclic GFR-binding peptide
  MOD_RES (20), (21): Xaa is C or S
VNSSDDFYLVNIPSLQTPAXXPKPVT

SEQ ID NO: 9998 - protein, 18 aa, Artificial Sequence
  Cyclic GFR-binding peptide
VVNNAADFYLINIPSLRA

SEQ ID NO: 9999 - protein, 22 aa, Artificial Sequence
  Cyclic GFR-binding peptide
  MOD_RES (16), (17): Xaa is C or S
DDFYLVNIPSLKTPAXXPKPVY

SEQ ID NO: 10000 - protein, 24 aa, Artificial Sequence
  Cyclic GFR-binding peptide
  MOD_RES (18), (19): Xaa is C or S
SSDDFYLVNIPSLKTPAXXPKPVY

SEQ ID NO: 10001 - protein, 13 aa, Artificial Sequence
  Cyclic GFR-binding peptide
FYLINIPSLRAPV

SEQ ID NO: 10002 - protein, 19 aa, Artificial Sequence
  Cyclic GFR-binding peptide
LLVRGNDFYLMNIPSTKVP

SEQ ID NO: 10003 - protein, 17 aa, Artificial Sequence
  Cyclic GFR-binding peptide
VVKENEDFYLMNIPSLE

SEQ ID NO: 10004 - protein, 20 aa, Artificial Sequence
  Cyclic GFR-binding peptide
  MOD_RES (14), (15): Xaa is C or S
FYLVNIPSLKTPAXXPKPVH

SEQ ID NO: 10005 - protein, 15 aa, Artificial Sequence
  Cyclic GFR-binding peptide
  MOD_RES (14), (15): Xaa is C or S
FYLINIPSLRTPVXX

SEQ ID NO: 10006 - protein, 22 aa, Artificial Sequence
  Cyclic GFR-binding peptide
  MOD_RES (16), (17): Xaa is C or S
EDFYLMNIPSLETPVXXAKPIK

SEQ ID NO: 10007 - protein, 16 aa, Artificial Sequence
  Cyclic GFR-binding peptide
IVNNSSDFYLVNIPSL

SEQ ID NO: 10008 - protein, 15 aa, Artificial Sequence
  Cyclic GFR-binding peptide
IVNNSSDFYLVNIPS

SEQ ID NO: 10009 - protein, 16 aa, Artificial Sequence
  Cyclic GFR-binding peptide
  MOD_RES (14), (14): Xaa is C or S
FYLVNIPSLKTPAXTP

SEQ ID NO: 10010 - protein, 26 aa, Artificial Sequence
  Cyclic GFR-binding peptide
  MOD_RES (20), (21): Xaa is C or S
VNSSDDFYLVNIPSLKTPAXXPKPVY

SEQ ID NO: 10011 - protein, 21 aa, Artificial Sequence
  Cyclic GFR-binding peptide
  MOD_RES (15), (16): Xaa is C or S
DFYLMNIPSLETPVXXAKPIK

SEQ ID NO: 10012 - protein, 23 aa, Artificial Sequence
  Cyclic GFR-binding peptide
  MOD_RES (17), (18): Xaa is C or S
SDDFYLVNIPSLQTPAXXPKPVT

SEQ ID NO: 10013 - protein, 25 aa, Artificial Sequence
  Cyclic GFR-binding peptide
  MOD_RES (19), (20): Xaa is C or S
NSSDDFYLVNIPSLKTPAXXPKPVY

SEQ ID NO: 10014 - protein, 17 aa, Artificial Sequence
  Cyclic GFR-binding peptide
  MOD_RES (14), (15): Xaa is C or S
FYLMNIPSLETPVXXAK

SEQ ID NO: 10015 - protein, 23 aa, Artificial Sequence
  Cyclic GFR-binding peptide
  MOD_RES (17), (18): Xaa is C or S
AADFYLINIPSLRAPVXXSAPAA

SEQ ID NO: 10016 - protein, 15 aa, Artificial Sequence
  Cyclic GFR-binding peptide
  MOD_RES (14), (15): Xaa is C or S
FYLINIPSLKTPVXX

SEQ ID NO: 10017 - protein, 22 aa, Artificial Sequence
  Cyclic GFR-binding peptide
  MOD_RES (16), (17): Xaa is C or S
DDFYLVNIPSLKTPVXXAKGVK

SEQ ID NO: 10018 - protein, 18 aa, Artificial Sequence
  Cyclic GFR-binding peptide
  MOD_RES (14), (15): Xaa is C or S
FYLVNIPSLKTPVXXAKG

SEQ ID NO: 10019 - protein, 19 aa, Artificial Sequence
  Cyclic GFR-binding peptide
  MOD_RES (14), (15): Xaa is C or S
FYLMNIPSTKVPAXXTSPV

SEQ ID NO: 10020 - protein, 15 aa, Artificial Sequence
  Cyclic GFR-binding peptide
  MOD_RES (14), (15): Xaa is C or S
FYLVNIPSLQTPAXX

SEQ ID NO: 10021 - protein, 19 aa, Artificial Sequence
  Cyclic GFR-binding peptide
VVNNAADFYLINIPSLRAP

SEQ ID NO: 10022 - protein, 24 aa, Artificial Sequence
  Cyclic GFR-binding peptide
  MOD_RES (18), (19): Xaa is C or S
VGKDFYLINIPSLKTPVXXAKSAK

SEQ ID NO: 10023 - protein, 18 aa, Artificial Sequence
  Cyclic GFR-binding peptide
IVNNSSDFYLVNIPSLKT

SEQ ID NO: 10024 - protein, 20 aa, Artificial Sequence
  Cyclic GFR-binding peptide
  MOD_RES (14), (15): Xaa is C or S
FYLVNIPSLKTPAXXPKPVY

SEQ ID NO: 10025 - protein, 24 aa, Artificial Sequence
  Cyclic GFR-binding peptide
  MOD_RES (18), (19): Xaa is C or S
NSSDFYLVNIPSLKTPAXXAKPVA

SEQ ID NO: 10026 - protein, 18 aa, Artificial Sequence
  Cyclic GFR-binding peptide
  MOD_RES (14), (15): Xaa is C or S
FYLINIPSLRAPVXXSAP

SEQ ID NO: 10027 - protein, 26 aa, Artificial Sequence
  Cyclic GFR-binding peptide
  MOD_RES (20), (21): Xaa is C or S
VNNASDFYLINIPSLRTPVXXTPPTS

SEQ ID NO: 10028 - protein, 22 aa, Artificial Sequence
  Cyclic GFR-binding peptide
  MOD_RES (16), (17): Xaa is C or S
DDFYLVNIPSLQTPAXXPKPVT

SEQ ID NO: 10029 - protein, 14 aa, Artificial Sequence
  Cyclic GFR-binding peptide
  MOD_RES (14), (14): Xaa is C or S
FYLMNIPSTKVPAX

SEQ ID NO: 10030 - protein, 26 aa, Artificial Sequence
  Cyclic GFR-binding peptide
  MOD_RES (20), (21): Xaa is C or S
TVVGKDFYLINIPSLKTPVXXAKSAK

SEQ ID NO: 10031 - protein, 23 aa, Artificial Sequence
  Cyclic GFR-binding peptide
  MOD_RES (17), (18): Xaa is C or S
GNDFYLMNIPSTKVPAXXTSPVR

SEQ ID NO: 10032 - protein, 26 aa, Artificial Sequence
  Cyclic GFR-binding peptide
  MOD_RES (20), (21): Xaa is C or S
VNNAADFYLINIPSLRAPVXXSAPAA

SEQ ID NO: 10033 - protein, 21 aa, Artificial Sequence
  Cyclic GFR-binding peptide
  MOD_RES (15), (15): Xaa is C or S
DFYLVNIPSLKTPAXTPKTVH

SEQ ID NO: 10034 - protein, 26 aa, Artificial Sequence
  Cyclic GFR-binding peptide
  MOD_RES (20), (21): Xaa is C or S
LVRGNDFYLMNIPSTKVPAXXTSPVR

SEQ ID NO: 10035 - protein, 25 aa, Artificial Sequence
  Cyclic GFR-binding peptide
  MOD_RES (19), (20): Xaa is C or S
NSSDDFYLVNIPSLQTPAXXPKPVT

SEQ ID NO: 10036 - protein, 18 aa, Artificial Sequence
  Cyclic GFR-binding peptide
LLVRGNDFYLMNIPSTKV

SEQ ID NO: 10037 - protein, 23 aa, Artificial Sequence
  Cyclic GFR-binding peptide
  MOD_RES (17), (18): Xaa is C or S
ASDFYLINIPSLRTPVXXTPPTS

SEQ ID NO: 10038 - protein, 17 aa, Artificial Sequence
  Cyclic GFR-binding peptide
YTVVGKDFYLINIPSLK

SEQ ID NO: 10039 - protein, 25 aa, Artificial Sequence
  Cyclic GFR-binding peptide
  MOD_RES (19), (20): Xaa is C or S
VRGNDFYLMNIPSTKVPAXXTSPVR

SEQ ID NO: 10040 - protein, 18 aa, Artificial Sequence
  Cyclic GFR-binding peptide
YTVVGKDFYLINIPSLKT

SEQ ID NO: 10041 - protein, 17 aa, Artificial Sequence
  Cyclic GFR-binding peptide
  MOD_RES (14), (15): Xaa is C or S
FYLINIPSLRAPVXXSA

SEQ ID NO: 10042 - protein, 17 aa, Artificial Sequence
  Cyclic GFR-binding peptide
IVNNSSDFYLVNIPSLK

SEQ ID NO: 10043 - protein, 14 aa, Artificial Sequence
  Cyclic GFR-binding peptide
  MOD_RES (14), (14): Xaa is C or S
FYLVNIPSLKTPAX

SEQ ID NO: 10044 - protein, 16 aa, Artificial Sequence
  Cyclic GFR-binding peptide
YTVVGKDFYLINIPSL

SEQ ID NO: 10045 - protein, 24 aa, Artificial Sequence
  Cyclic GFR-binding peptide
  MOD_RES (18), (19): Xaa is C or S
NAADFYLINIPSLRAPVXXSAPAA

SEQ ID NO: 10046 - protein, 20 aa, Artificial Sequence
  Cyclic GFR-binding peptide
  MOD_RES (14), (15): Xaa is C or S
FYLVNIPSLKTPAXXAKPVA

SEQ ID NO: 10047 - protein, 19 aa, Artificial Sequence
  Cyclic GFR-binding peptide
  MOD_RES (14), (15): Xaa is C or S
FYLINIPSLRTPVXXTPPT

SEQ ID NO: 10048 - protein, 19 aa, Artificial Sequence
  Cyclic GFR-binding peptide
TPVGMDDFYLVNIPSLKTP

SEQ ID NO: 10049 - protein, 27 aa, Artificial Sequence
  Cyclic GFR-binding peptide
  MOD_RES (21), (22): Xaa is C or S
IVNSSDDFYLVNIPSLKTPAXXPKPVY

SEQ ID NO: 10050 - protein, 19 aa, Artificial Sequence
  Cyclic GFR-binding peptide
  MOD_RES (14), (15): Xaa is C or S
FYLVNIPSLKTPAXXPKPV

SEQ ID NO: 10051 - protein, 19 aa, Artificial Sequence
  Cyclic GFR-binding peptide
  MOD_RES (14), (15): Xaa is C or S
FYLINIPSLKTPVXXAKSA

SEQ ID NO: 10052 - protein, 17 aa, Artificial Sequence
  Cyclic GFR-binding peptide
  MOD_RES (14), (15): Xaa is C or S
FYLVNIPSLKTPVXXAK

SEQ ID NO: 10053 - protein, 20 aa, Artificial Sequence
  Cyclic GFR-binding peptide
  MOD_RES (14), (15): Xaa is C or S
FYLMNIPSTKVPAXXTSPVR

SEQ ID NO: 10054 - protein, 22 aa, Artificial Sequence
  Cyclic GFR-binding peptide
  MOD_RES (16), (17): Xaa is C or S
SDFYLINIPSLRTPVXXTPPTS

SEQ ID NO: 10055 - protein, 21 aa, Artificial Sequence
  Cyclic GFR-binding peptide
  MOD_RES (15), (16): Xaa is C or S
DFYLVNIPSLQTPAXXPKPVT

SEQ ID NO: 10056 - protein, 16 aa, Artificial Sequence
  Cyclic GFR-binding peptide
  MOD_RES (14), (15): Xaa is C or S
FYLMNIPSLETPVXXA

SEQ ID NO: 10057 - protein, 26 aa, Artificial Sequence
  Cyclic GFR-binding peptide
  MOD_RES (20), (21): Xaa is C or S
VKDYEDFYLMNIPSLETPVXXAKPIS

SEQ ID NO: 10058 - protein, 25 aa, Artificial Sequence
  Cyclic GFR-binding peptide
  MOD_RES (19), (20): Xaa is C or S
NSSDDFYLVNIPSLKTPAXXPKPVH

SEQ ID NO: 10059 - protein, 25 aa, Artificial Sequence
  Cyclic GFR-binding peptide
  MOD_RES (19), (20): Xaa is C or S
KDYEDFYLMNIPSLETPVXXAKPIS

SEQ ID NO: 10060 - protein, 13 aa, Artificial Sequence
  Cyclic GFR-binding peptide
FYLVNIPSLKTPA

SEQ ID NO: 10061 - protein, 26 aa, Artificial Sequence
  Cyclic GFR-binding peptide
  MOD_RES (20), (21): Xaa is C or S
VNSSDDFYLVNIPSLKTPAXXPKPVH

SEQ ID NO: 10062 - protein, 21 aa, Artificial Sequence
  Cyclic GFR-binding peptide
  MOD_RES (15), (16): Xaa is C or S
DFYLINIPSLRTPVXXTPPTS

SEQ ID NO: 10063 - protein, 14 aa, Artificial Sequence
  Cyclic GFR-binding peptide
  MOD_RES (14), (14): Xaa is C or S
FYLINIPSLKTPVX

SEQ ID NO: 10064 - protein, 27 aa, Artificial Sequence
  Cyclic GFR-binding peptide
  MOD_RES (21), (22): Xaa is C or S
IVNNSSDFYLVNIPSLKTPAXXAKPVA

SEQ ID NO: 10065 - protein, 16 aa, Artificial Sequence
  Cyclic GFR-binding peptide
  MOD_RES (14), (15): Xaa is C or S
FYLINIPSLRAPVXXS

SEQ ID NO: 10066 - protein, 15 aa, Artificial Sequence
  Cyclic GFR-binding peptide
  MOD_RES (14), (15): Xaa is C or S
FYLMNIPSTKVPAXX

SEQ ID NO: 10067 - protein, 21 aa, Artificial Sequence
  Cyclic GFR-binding peptide
  MOD_RES (15), (16): Xaa is C or S
DFYLINIPSLRAPVXXSAPAA

SEQ ID NO: 10068 - protein, 14 aa, Artificial Sequence
  Cyclic GFR-binding peptide
  MOD_RES (14), (14): Xaa is C or S
FYLVNIPSLQTPAX

SEQ ID NO: 10069 - protein, 27 aa, Artificial Sequence
  Cyclic GFR-binding peptide
  MOD_RES (21), (22): Xaa is C or S
YTVVGKDFYLINIPSLKTPVXXAKSAK

SEQ ID NO: 10070 - protein, 19 aa, Artificial Sequence
  Cyclic GFR-binding peptide
  MOD_RES (14), (15): Xaa is C or S
FYLMNIPSLETPVXXAKPI

SEQ ID NO: 10071 - protein, 27 aa, Artificial Sequence
  Cyclic GFR-binding peptide
  MOD_RES (21), (22): Xaa is C or S
VVKDYEDFYLMNIPSLETPVXXAKPIS

SEQ ID NO: 10072 - protein, 21 aa, Artificial Sequence
  Cyclic GFR-binding peptide
  MOD_RES (15), (16): Xaa is C or S
DFYLVNIPSLKTPVXXAKGVK

SEQ ID NO: 10073 - protein, 23 aa, Artificial Sequence
  Cyclic GFR-binding peptide
  MOD_RES (17), (17): Xaa is C or S
SDDFYLVNIPSLKTPAXTPKTVH

SEQ ID NO: 10074 - protein, 20 aa, Artificial Sequence
  Cyclic GFR-binding peptide
  MOD_RES (14), (15): Xaa is C or S
FYLINIPSLRAPVXXSAPAA

SEQ ID NO: 10075 - protein, 13 aa, Artificial Sequence
  Cyclic GFR-binding peptide
FYLVNIPSLKTPV

SEQ ID NO: 10076 - protein, 18 aa, Artificial Sequence
  Cyclic GFR-binding peptide
VVKENEDFYLMNIPSLET

SEQ ID NO: 10077 - protein, 26 aa, Artificial Sequence
  Cyclic GFR-binding peptide
  MOD_RES (20), (21): Xaa is C or S
VNNSSDFYLVNIPSLKTPAXXAKPVA

SEQ ID NO: 10078 - protein, 15 aa, Artificial Sequence
  Cyclic GFR-binding peptide
TPVGMDDFYLVNIPS

SEQ ID NO: 10079 - protein, 17 aa, Artificial Sequence
  Cyclic GFR-binding peptide
VVNNASDFYLINIPSLR

SEQ ID NO: 10080 - protein, 14 aa, Artificial Sequence
  Cyclic GFR-binding peptide
  MOD_RES (14), (14): Xaa is C or S
FYLINIPSLRTPVX

SEQ ID NO: 10081 - protein, 17 aa, Artificial Sequence
  Cyclic GFR-binding peptide
  MOD_RES (14), (14): Xaa is C or S
FYLVNIPSLKTPAXTPK

SEQ ID NO: 10082 - protein, 20 aa, Artificial Sequence
  Cyclic GFR-binding peptide
  MOD_RES (14), (15): Xaa is C or S
FYLINIPSLKTPVXXAKSAK

SEQ ID NO: 10083 - protein, 20 aa, Artificial Sequence
  Cyclic GFR-binding peptide
  MOD_RES (14), (15): Xaa is C or S
FYLMNIPSLETPVXXAKPIS

SEQ ID NO: 10084 - protein, 17 aa, Artificial Sequence
  Cyclic GFR-binding peptide
  MOD_RES (14), (15): Xaa is C or S
FYLINIPSLRTPVXXTP

SEQ ID NO: 10085 - protein, 16 aa, Artificial Sequence
  Cyclic GFR-binding peptide
  MOD_RES (14), (15): Xaa is C or S
FYLMNIPSTKVPAXXT

SEQ ID NO: 10086 - protein, 15 aa, Artificial Sequence
  Cyclic GFR-binding peptide
VVKDYEDFYLMNIPS

SEQ ID NO: 10087 - protein, 18 aa, Artificial Sequence
  Cyclic GFR-binding peptide
  MOD_RES (14), (15): Xaa is C or S
FYLMNIPSLETPVXXAKP

SEQ ID NO: 10088 - protein, 16 aa, Artificial Sequence
  Cyclic GFR-binding peptide
VVNNAADFYLINIPSL

SEQ ID NO: 10089 - protein, 16 aa, Artificial Sequence
  Cyclic GFR-binding peptide
  MOD_RES (14), (15): Xaa is C or S
FYLVNIPSLKTPAXXP

SEQ ID NO: 10090 - protein, 15 aa, Artificial Sequence
  Cyclic GFR-binding peptide
VVKENEDFYLMNIPS

SEQ ID NO: 10091 - protein, 19 aa, Artificial Sequence
  Cyclic GFR-binding peptide
  MOD_RES (14), (15): Xaa is C or S
FYLVNIPSLKTPAXXAKPV

SEQ ID NO: 10092 - protein, 13 aa, Artificial Sequence
  Cyclic GFR-binding peptide
FYLMNIPSTKVPA

SEQ ID NO: 10093 - protein, 24 aa, Artificial Sequence
  Cyclic GFR-binding peptide
  MOD_RES (18), (19): Xaa is C or S
RGNDFYLMNIPSTKVPAXXTSPVR

SEQ ID NO: 10094 - protein, 19 aa, Artificial Sequence
  Cyclic GFR-binding peptide
YTVVGKDFYLINIPSLKTP

SEQ ID NO: 10095 - protein, 24 aa, Artificial Sequence
  Cyclic GFR-binding peptide
  MOD_RES (18), (19): Xaa is C or S
DYEDFYLMNIPSLETPVXXAKPIS

SEQ ID NO: 10096 - protein, 18 aa, Artificial Sequence
  Cyclic GFR-binding peptide
TPVGMDDFYLVNIPSLKT

SEQ ID NO: 10097 - protein, 16 aa, Artificial Sequence
  Cyclic GFR-binding peptide
LLVRGNDFYLMNIPST

SEQ ID NO: 10098 - protein, 19 aa, Artificial Sequence
  Cyclic GFR-binding peptide
IVNNSSDFYLVNIPSLKTP

SEQ ID NO: 10099 - protein, 23 aa, Artificial Sequence
  Cyclic GFR-binding peptide
  MOD_RES (17), (18): Xaa is C or S
YEDFYLMNIPSLETPVXXAKPIS

SEQ ID NO: 10100 - protein, 19 aa, Artificial Sequence
  Cyclic GFR-binding peptide
IVNSSDDFYLVNIPSLKTP

SEQ ID NO: 10101 - protein, 14 aa, Artificial Sequence
  Cyclic GFR-binding peptide
  MOD_RES (14), (14): Xaa is C or S
FYLMNIPSLETPVX

SEQ ID NO: 10102 - protein, 19 aa, Artificial Sequence
  Cyclic GFR-binding peptide
  MOD_RES (14), (15): Xaa is C or S
FYLVNIPSLQTPAXXPKPV

SEQ ID NO: 10103 - protein, 16 aa, Artificial Sequence
  Cyclic GFR-binding peptide
VVNNASDFYLINIPSL

SEQ ID NO: 10104 - protein, 16 aa, Artificial Sequence
  Cyclic GFR-binding peptide
  MOD_RES (14), (15): Xaa is C or S
FYLVNIPSLKTPVXXA

SEQ ID NO: 10105 - protein, 19 aa, Artificial Sequence
  Cyclic GFR-binding peptide
IVNSSDDFYLVNIPSLQTP

SEQ ID NO: 10106 - protein, 24 aa, Artificial Sequence
  Cyclic GFR-binding peptide
  MOD_RES (18), (19): Xaa is C or S
ENEDFYLMNIPSLETPVXXAKPIK

SEQ ID NO: 10107 - protein, 18 aa, Artificial Sequence
  Cyclic GFR-binding peptide
  MOD_RES (14), (15): Xaa is C or S
FYLVNIPSLKTPAXXPKP

SEQ ID NO: 10108 - protein, 25 aa, Artificial Sequence
  Cyclic GFR-binding peptide
  MOD_RES (19), (20): Xaa is C or S
NNAADFYLINIPSLRAPVXXSAPAA

SEQ ID NO: 10109 - protein, 19 aa, Artificial Sequence
  Cyclic GFR-binding peptide
VVKDYEDFYLMNIPSLETP

SEQ ID NO: 10110 - protein, 19 aa, Artificial Sequence
  Cyclic GFR-binding peptide
VVNNASDFYLINIPSLRTP

SEQ ID NO: 10111 - protein, 23 aa, Artificial Sequence
  Cyclic GFR-binding peptide
  MOD_RES (17), (18): Xaa is C or S
MDDFYLVNIPSLKTPVXXAKGVK

SEQ ID NO: 10112 - protein, 18 aa, Artificial Sequence
  Cyclic GFR-binding peptide
  MOD_RES (14), (15): Xaa is C or S
FYLINIPSLKTPVXXAKS

SEQ ID NO: 10113 - protein, 13 aa, Artificial Sequence
  Cyclic GFR-binding peptide
FYLMNIPSLETPV

SEQ ID NO: 10114 - protein, 24 aa, Artificial Sequence
  Cyclic GFR-binding peptide
  MOD_RES (18), (19): Xaa is C or S
NASDFYLINIPSLRTPVXXTPPTS

SEQ ID NO: 10115 - protein, 16 aa, Artificial Sequence
  Cyclic GFR-binding peptide
  MOD_RES (14), (15): Xaa is C or S
FYLINIPSLKTPVXXA

SEQ ID NO: 10116 - protein, 22 aa, Artificial Sequence
  Cyclic GFR-binding peptide
  MOD_RES (16), (17): Xaa is C or S
EDFYLMNIPSLETPVXXAKPIS

SEQ ID NO: 10117 - protein, 16 aa, Artificial Sequence
  Cyclic GFR-binding peptide
IVNSSDDFYLVNIPSL

SEQ ID NO: 10118 - protein, 21 aa, Artificial Sequence
  Cyclic GFR-binding peptide
  MOD_RES (15), (16): Xaa is C or S
DFYLVNIPSLKTPAXXPKPVY

SEQ ID NO: 10119 - protein, 15 aa, Artificial Sequence
  Cyclic GFR-binding peptide
  MOD_RES (14), (15): Xaa is C or S
FYLVNIPSLKTPVXX

SEQ ID NO: 10120 - protein, 23 aa, Artificial Sequence
  Cyclic GFR-binding peptide
  MOD_RES (17), (18): Xaa is C or S
SSDFYLVNIPSLKTPAXXAKPVA

SEQ ID NO: 10121 - protein, 15 aa, Artificial Sequence
  Cyclic GFR-binding peptide
IVNSSDDFYLVNIPS

SEQ ID NO: 10122 - protein, 15 aa, Artificial Sequence
  Cyclic GFR-binding peptide
  MOD_RES (14), (15): Xaa is C or S
FYLVNIPSLKTPAXX

SEQ ID NO: 10123 - protein, 26 aa, Artificial Sequence
  Cyclic GFR-binding peptide
  MOD_RES (20), (20): Xaa is C or S
VNSSDDFYLVNIPSLKTPAXTPKTVH

SEQ ID NO: 10124 - protein, 17 aa, Artificial Sequence
  Cyclic GFR-binding peptide
VVNNAADFYLINIPSLR

SEQ ID NO: 10125 - protein, 21 aa, Artificial Sequence
  Cyclic GFR-binding peptide
  MOD_RES (15), (16): Xaa is C or S
DFYLVNIPSLKTPAXXAKPVA

SEQ ID NO: 10126 - protein, 21 aa, Artificial Sequence
  Cyclic GFR-binding peptide
  MOD_RES (15), (16): Xaa is C or S
DFYLVNIPSLKTPAXXPKPVH

SEQ ID NO: 10127 - protein, 18 aa, Artificial Sequence
  Cyclic GFR-binding peptide
VVNNASDFYLINIPSLRT

SEQ ID NO: 10128 - protein, 17 aa, Artificial Sequence
  Cyclic GFR-binding peptide
  MOD_RES (14), (15): Xaa is C or S
FYLMNIPSTKVPAXXTS

SEQ ID NO: 10129 - protein, 15 aa, Artificial Sequence
  Cyclic GFR-binding peptide
  MOD_RES (14), (14): Xaa is C or S
FYLVNIPSLKTPAXT

SEQ ID NO: 10130 - protein, 27 aa, Artificial Sequence
  Cyclic GFR-binding peptide
  MOD_RES (21), (22): Xaa is C or S
IVNSSDDFYLVNIPSLKTPAXXPKPVH

SEQ ID NO: 10131 - protein, 26 aa, Artificial Sequence
  Cyclic GFR-binding peptide
  MOD_RES (20), (21): Xaa is C or S
VKENEDFYLMNIPSLETPVXXAKPIK

SEQ ID NO: 10132 - protein, 23 aa, Artificial Sequence
  Cyclic GFR-binding peptide
  MOD_RES (17), (18): Xaa is C or S
NEDFYLMNIPSLETPVXXAKPIK

SEQ ID NO: 10133 - protein, 16 aa, Artificial Sequence
  Cyclic GFR-binding peptide
  MOD_RES (14), (15): Xaa is C or S
FYLVNIPSLQTPAXXP

SEQ ID NO: 10134 - protein, 24 aa, Artificial Sequence
  Cyclic GFR-binding peptide
  MOD_RES (18), (19): Xaa is C or S
GMDDFYLVNIPSLKTPVXXAKGVK

SEQ ID NO: 10135 - protein, 22 aa, Artificial Sequence
  Cyclic GFR-binding peptide
  MOD_RES (16), (17): Xaa is C or S
KDFYLINIPSLKTPVXXAKSAK

SEQ ID NO: 10136 - protein, 18 aa, Artificial Sequence
  Cyclic GFR-binding peptide
  MOD_RES (14), (15): Xaa is C or S
FYLVNIPSLKTPAXXAKP

SEQ ID NO: 10137 - protein, 19 aa, Artificial Sequence
  Cyclic GFR-binding peptide
  MOD_RES (14), (15): Xaa is C or S
FYLINIPSLRAPVXXSAPA

SEQ ID NO: 10138 - protein, 25 aa, Artificial Sequence
  Cyclic GFR-binding peptide
  MOD_RES (19), (20): Xaa is C or S
VGMDDFYLVNIPSLKTPVXXAKGVK

SEQ ID NO: 10139 - protein, 24 aa, Artificial Sequence
  Cyclic GFR-binding peptide
  MOD_RES (18), (18): Xaa is C or S
SSDDFYLVNIPSLKTPAXTPKTVH

SEQ ID NO: 10140 - protein, 17 aa, Artificial Sequence
  Cyclic GFR-binding peptide
  MOD_RES (14), (15): Xaa is C or S
FYLINIPSLKTPVXXAK

SEQ ID NO: 10141 - protein, 16 aa, Artificial Sequence
  Cyclic GFR-binding peptide
VVKDYEDFYLMNIPSL

SEQ ID NO: 10142 - protein, 22 aa, Artificial Sequence
  Cyclic GFR-binding peptide
  MOD_RES (16), (17): Xaa is C or S
DDFYLVNIPSLKTPAXXPKPVH

SEQ ID NO: 10143 - protein, 17 aa, Artificial Sequence
  Cyclic GFR-binding peptide
IVNSSDDFYLVNIPSLQ

SEQ ID NO: 10144 - protein, 17 aa, Artificial Sequence
  Cyclic GFR-binding peptide
  MOD_RES (14), (15): Xaa is C or S
FYLVNIPSLKTPAXXPK

SEQ ID NO: 10145 - protein, 27 aa, Artificial Sequence
  Cyclic GFR-binding peptide
  MOD_RES (21), (22): Xaa is C or S
IVNSSDDFYLVNIPSLQTPAXXPKPVT

SEQ ID NO: 10146 - protein, 20 aa, Artificial Sequence
  Cyclic GFR-binding peptide
  MOD_RES (14), (15): Xaa is C or S
FYLINIPSLRTPVXXTPPTS

SEQ ID NO: 10147 - protein, 27 aa, Artificial Sequence
  Cyclic GFR-binding peptide
  MOD_RES (21), (22): Xaa is C or S
LLVRGNDFYLMNIPSTKVPAXXTSPVR

SEQ ID NO: 10148 - protein, 17 aa, Artificial Sequence
  Cyclic GFR-binding peptide
VVKDYEDFYLMNIPSLE

SEQ ID NO: 10149 - protein, 21 aa, Artificial Sequence
  Cyclic GFR-binding peptide
  MOD_RES (15), (16): Xaa is C or S
DFYLINIPSLKTPVXXAKSAK

SEQ ID NO: 10150 - protein, 19 aa, Artificial Sequence
  Cyclic GFR-binding peptide
  MOD_RES (14), (15): Xaa is C or S
FYLVNIPSLKTPVXXAKGV

SEQ ID NO: 10151 - protein, 18 aa, Artificial Sequence
  Cyclic GFR-binding peptide
IVNSSDDFYLVNIPSLQT

SEQ ID NO: 10152 - protein, 15 aa, Artificial Sequence
  Cyclic GFR-binding peptide
VVNNAADFYLINIPS

SEQ ID NO: 10153 - protein, 18 aa, Artificial Sequence
  Cyclic GFR-binding peptide
IVNSSDDFYLVNIPSLKT

SEQ ID NO: 10154 - protein, 18 aa, Artificial Sequence
  Cyclic GFR-binding peptide
VVKDYEDFYLMNIPSLET

SEQ ID NO: 10155 - protein, 15 aa, Artificial Sequence
  Cyclic GFR-binding peptide
VVNNASDFYLINIPS

SEQ ID NO: 10156 - protein, 20 aa, Artificial Sequence
  Cyclic GFR-binding peptide
  MOD_RES (14), (14): Xaa is C or S
FYLVNIPSLKTPAXTPKTVH

SEQ ID NO: 10157 - protein, 22 aa, Artificial Sequence
  Cyclic GFR-binding peptide
  MOD_RES (16), (17): Xaa is C or S
NDFYLMNIPSTKVPAXXTSPVR

SEQ ID NO: 10158 - protein, 14 aa, Artificial Sequence
  Cyclic GFR-binding peptide
  MOD_RES (14), (14): Xaa is C or S
FYLINIPSLRAPVX

SEQ ID NO: 10159 - protein, 22 aa, Artificial Sequence
  Cyclic GFR-binding peptide
  MOD_RES (16), (17): Xaa is C or S
SDFYLVNIPSLKTPAXXAKPVA

SEQ ID NO: 10160 - protein, 25 aa, Artificial Sequence
  Cyclic GFR-binding peptide
  MOD_RES (7), (7): Xaa is C or S
HVTKPTXAPTKLSPINVLYFDDSSN

SEQ ID NO: 10161 - protein, 25 aa, Artificial Sequence
  Cyclic GFR-binding peptide
  MOD_RES (6), (7): Xaa is C or S
STPPTXXVPTRLSPINILYFDSANN

SEQ ID NO: 10162 - protein, 17 aa, Artificial Sequence
  Cyclic GFR-binding peptide
KLSPINVLYFDDSSNVI

SEQ ID NO: 10163 - protein, 27 aa, Artificial Sequence
  Cyclic GFR-binding peptide
  MOD_RES (6), (7): Xaa is C or S
KVGKAXXVPTKLSPINVLYFDDMGVPT

SEQ ID NO: 10164 - protein, 16 aa, Artificial Sequence
  Cyclic GFR-binding peptide
LSPINMLYFDENEKVV

SEQ ID NO: 10165 - protein, 13 aa, Artificial Sequence
  Cyclic GFR-binding peptide
VPTRLSPINILYF

SEQ ID NO: 10166 - protein, 17 aa, Artificial Sequence
  Cyclic GFR-binding peptide
KTSPINMLYFDNGRVLL

SEQ ID NO: 10167 - protein, 25 aa, Artificial Sequence
  Cyclic GFR-binding peptide
  MOD_RES (6), (7): Xaa is C or S
KASKAXXVPTKLSPINILYFDKGVV

SEQ ID NO: 10168 - protein, 17 aa, Artificial Sequence
  Cyclic GFR-binding peptide
  MOD_RES (3), (4): Xaa is C or S
KAXXAPTKLSPINVLYF

SEQ ID NO: 10169 - protein, 15 aa, Artificial Sequence
  Cyclic GFR-binding peptide
  MOD_RES (1), (2): Xaa is C or S
XXVPTELSPINMLYF

SEQ ID NO: 10170 - protein, 16 aa, Artificial Sequence
  Cyclic GFR-binding peptide
  MOD_RES (2), (3): Xaa is C or S
TXXVPTRLSPINILYF

SEQ ID NO: 10171 - protein, 21 aa, Artificial Sequence
  Cyclic GFR-binding peptide
  MOD_RES (6), (7): Xaa is C or S
SIPKAXXVPTELSPINMLYFD

SEQ ID NO: 10172 - protein, 27 aa, Artificial Sequence
  Cyclic GFR-binding peptide
  MOD_RES (6), (7): Xaa is C or S
AAPASXXVPARLSPINILYFDAANNVV

SEQ ID NO: 10173 - protein, 22 aa, Artificial Sequence
  Cyclic GFR-binding peptide
  MOD_RES (6), (7): Xaa is C or S
AAPASXXVPARLSPINILYFDA

SEQ ID NO: 10174 - protein, 24 aa, Artificial Sequence
  Cyclic GFR-binding peptide
  MOD_RES (6), (7): Xaa is C or S
HVPKPXXAPTKLSPINVLYFDDSS

SEQ ID NO: 10175 - protein, 19 aa, Artificial Sequence
  Cyclic GFR-binding peptide
PTELSPINMLYFDENEKVV

SEQ ID NO: 10176 - protein, 27 aa, Artificial Sequence
  Cyclic GFR-binding peptide
  MOD_RES (6), (7): Xaa is C or S
STPPTXXVPTRLSPINILYFDSANNVV

SEQ ID NO: 10177 - protein, 13 aa, Artificial Sequence
  Cyclic GFR-binding peptide
VPTKLSPINILYF

SEQ ID NO: 10178 - protein, 19 aa, Artificial Sequence
  Cyclic GFR-binding peptide
  MOD_RES (6), (6): Xaa is C or S
VTKPTXAPTKLSPINVLYF

SEQ ID NO: 10179 - protein, 25 aa, Artificial Sequence
  Cyclic GFR-binding peptide
  MOD_RES (6), (7): Xaa is C or S
AVPKAXXAPTKLSPINVLYFDSSNN

SEQ ID NO: 10180 - protein, 13 aa, Artificial Sequence
  Cyclic GFR-binding peptide
APTQLSPINVLYF

SEQ ID NO: 10181 - protein, 20 aa, Artificial Sequence
  Cyclic GFR-binding peptide
  MOD_RES (6), (7): Xaa is C or S
TVPKPXXAPTQLSPINVLYF

SEQ ID NO: 10182 - protein, 23 aa, Artificial Sequence
  Cyclic GFR-binding peptide
  MOD_RES (6), (7): Xaa is C or S
KASKAXXVPTKLSPINILYFDKG

SEQ ID NO: 10183 - protein, 20 aa, Artificial Sequence
  Cyclic GFR-binding peptide
  MOD_RES (6), (7): Xaa is C or S
KVGKAXXVPTKLSPINVLYF

SEQ ID NO: 10184 - protein, 16 aa, Artificial Sequence
  Cyclic GFR-binding peptide
LSPINVLYFDDMGVPT

SEQ ID NO: 10185 - protein, 21 aa, Artificial Sequence
  Cyclic GFR-binding peptide
  MOD_RES (6), (7): Xaa is C or S
RVPSTXXAPVKTSPINMLYFD

SEQ ID NO: 10186 - protein, 14 aa, Artificial Sequence
  Cyclic GFR-binding peptide
  MOD_RES (1), (1): Xaa is C or S
XVPTKLSPINVLYF

SEQ ID NO: 10187 - protein, 22 aa, Artificial Sequence
  Cyclic GFR-binding peptide
  MOD_RES (7), (7): Xaa is C or S
HVTKPTXAPTKLSPINVLYFDD

SEQ ID NO: 10188 - protein, 23 aa, Artificial Sequence
  Cyclic GFR-binding peptide
  MOD_RES (6), (7): Xaa is C or S
YVPKPXXAPTKLSPINVLYFDDS

SEQ ID NO: 10189 - protein, 17 aa, Artificial Sequence
  Cyclic GFR-binding peptide
KLSPINVLYFDDMGVPT

SEQ ID NO: 10190 - protein, 18 aa, Artificial Sequence
  Cyclic GFR-binding peptide
  MOD_RES (5), (5): Xaa is C or S
TKPTXAPTKLSPINVLYF

SEQ ID NO: 10191 - protein, 20 aa, Artificial Sequence
  Cyclic GFR-binding peptide
  MOD_RES (6), (7): Xaa is C or S
KIPKAXXVPTELSPINMLYF

SEQ ID NO: 10192 - protein, 15 aa, Artificial Sequence
  Cyclic GFR-binding peptide
  MOD_RES (1), (2): Xaa is C or S
XXVPARLSPINILYF

SEQ ID NO: 10193 - protein, 25 aa, Artificial Sequence
  Cyclic GFR-binding peptide
  MOD_RES (6), (7): Xaa is C or S
KIPKAXXVPTELSPINMLYFDENEK

SEQ ID NO: 10194 - protein, 26 aa, Artificial Sequence
  Cyclic GFR-binding peptide
  MOD_RES (6), (7): Xaa is C or S
KVGKAXXVPTKLSPINVLYFDDMGVP

SEQ ID NO: 10195 - protein, 24 aa, Artificial Sequence
  Cyclic GFR-binding peptide
  MOD_RES (6), (7): Xaa is C or S
TVPKPXXAPTQLSPINVLYFDDSS

SEQ ID NO: 10196 - protein, 27 aa, Artificial Sequence
  Cyclic GFR-binding peptide
  MOD_RES (7), (7): Xaa is C or S
HVTKPTXAPTKLSPINVLYFDDSSNVI

SEQ ID NO: 10197 - protein, 17 aa, Artificial Sequence
  Cyclic GFR-binding peptide
  MOD_RES (3), (4): Xaa is C or S
KPXXAPTQLSPINVLYF

SEQ ID NO: 10198 - protein, 15 aa, Artificial Sequence
  Cyclic GFR-binding peptide
SPINMLYFDNGRVLL

SEQ ID NO: 10199 - protein, 23 aa, Artificial Sequence
  Cyclic GFR-binding peptide
  MOD_RES (6), (7): Xaa is C or S
HVPKPXXAPTKLSPINVLYFDDS

SEQ ID NO: 10200 - protein, 27 aa, Artificial Sequence
  Cyclic GFR-binding peptide
  MOD_RES (6), (7): Xaa is C or S
KIPKAXXVPTELSPINMLYFDENEKVV

SEQ ID NO: 10201 - protein, 18 aa, Artificial Sequence
  Cyclic GFR-binding peptide
  MOD_RES (4), (5): Xaa is C or S
PSTXXAPVKTSPINMLYF

SEQ ID NO: 10202 - protein, 15 aa, Artificial Sequence
  Cyclic GFR-binding peptide
SPINILYFDKGVVTY

SEQ ID NO: 10203 - protein, 18 aa, Artificial Sequence
  Cyclic GFR-binding peptide
  MOD_RES (4), (5): Xaa is C or S
PPTXXVPTRLSPINILYF

SEQ ID NO: 10204 - protein, 18 aa, Artificial Sequence
  Cyclic GFR-binding peptide
  MOD_RES (4), (5): Xaa is C or S
PKPXXAPTQLSPINVLYF

SEQ ID NO: 10205 - protein, 16 aa, Artificial Sequence
  Cyclic GFR-binding peptide
  MOD_RES (2), (3): Xaa is C or S
AXXAPTKLSPINVLYF

SEQ ID NO: 10206 - protein, 26 aa, Artificial Sequence
  Cyclic GFR-binding peptide
  MOD_RES (6), (7): Xaa is C or S
TVPKPXXAPTQLSPINVLYFDDSSNV

SEQ ID NO: 10207 - protein, 18 aa, Artificial Sequence
  Cyclic GFR-binding peptide
ARLSPINILYFDAANNVV

SEQ ID NO: 10208 - protein, 22 aa, Artificial Sequence
  Cyclic GFR-binding peptide
  MOD_RES (6), (7): Xaa is C or S
YVPKPXXAPTKLSPINVLYFDD

SEQ ID NO: 10209 - protein, 24 aa, Artificial Sequence
  Cyclic GFR-binding peptide
  MOD_RES (6), (7): Xaa is C or S
YVPKPXXAPTKLSPINVLYFDDSS

SEQ ID NO: 10210 - protein, 13 aa, Artificial Sequence
  Cyclic GFR-binding peptide
VPARLSPINILYF

SEQ ID NO: 10211 - protein, 19 aa, Artificial Sequence
  Cyclic GFR-binding peptide
PVKTSPINMLYFDNGRVLL

SEQ ID NO: 10212 - protein, 17 aa, Artificial Sequence
  Cyclic GFR-binding peptide
ELSPINMLYFDENEKVV

SEQ ID NO: 10213 - protein, 20 aa, Artificial Sequence
  Cyclic GFR-binding peptide
  MOD_RES (6), (7): Xaa is C or S
HVPKPXXAPTKLSPINVLYF

SEQ ID NO: 10214 - protein, 15 aa, Artificial Sequence
  Cyclic GFR-binding peptide
  MOD_RES (1), (2): Xaa is C or S
XXVPTRLSPINILYF

SEQ ID NO: 10215 - protein, 22 aa, Artificial Sequence
  Cyclic GFR-binding peptide
  MOD_RES (6), (7): Xaa is C or S
KIPKAXXVPTELSPINMLYFDE

SEQ ID NO: 10216 - protein, 16 aa, Artificial Sequence
  Cyclic GFR-binding peptide
LSPINVLYFDSSNNVI

SEQ ID NO: 10217 - protein, 15 aa, Artificial Sequence
  Cyclic GFR-binding peptide
SPINVLYFDSSNNVI

SEQ ID NO: 10218 - protein, 16 aa, Artificial Sequence
  Cyclic GFR-binding peptide
  MOD_RES (3), (3): Xaa is C or S
PTXAPTKLSPINVLYF

SEQ ID NO: 10219 - protein, 26 aa, Artificial Sequence
  Cyclic GFR-binding peptide
  MOD_RES (6), (7): Xaa is C or S
YVPKPXXAPTKLSPINVLYFDDSSNV

SEQ ID NO: 10220 - protein, 21 aa, Artificial Sequence
  Cyclic GFR-binding peptide
  MOD_RES (6), (7): Xaa is C or S
KIPKAXXVPTELSPINMLYFD

SEQ ID NO: 10221 - protein, 23 aa, Artificial Sequence
  Cyclic GFR-binding peptide
  MOD_RES (6), (7): Xaa is C or S
TVPKPXXAPTQLSPINVLYFDDS

SEQ ID NO: 10222 - protein, 25 aa, Artificial Sequence
  Cyclic GFR-binding peptide
  MOD_RES (6), (7): Xaa is C or S
YVPKPXXAPTKLSPINVLYFDDSSN

SEQ ID NO: 10223 - protein, 17 aa, Artificial Sequence
  Cyclic GFR-binding peptide
  MOD_RES (3), (4): Xaa is C or S
KAXXVPTELSPINMLYF

SEQ ID NO: 10224 - protein, 23 aa, Artificial Sequence
  Cyclic GFR-binding peptide
  MOD_RES (6), (7): Xaa is C or S
AAPASXXVPARLSPINILYFDAA

SEQ ID NO: 10225 - protein, 15 aa, Artificial Sequence
  Cyclic GFR-binding peptide
  MOD_RES (1), (2): Xaa is C or S
XXVPTKLSPINILYF

SEQ ID NO: 10226 - protein, 22 aa, Artificial Sequence
  Cyclic GFR-binding peptide
  MOD_RES (6), (7): Xaa is C or S
KVGKAXXVPTKLSPINVLYFDD

SEQ ID NO: 10227 - protein, 18 aa, Artificial Sequence
  Cyclic GFR-binding peptide
  MOD_RES (4), (5): Xaa is C or S
GKAXXVPTKLSPINVLYF

SEQ ID NO: 10228 - protein, 19 aa, Artificial Sequence
  Cyclic GFR-binding peptide
  MOD_RES (5), (6): Xaa is C or S
VPSTXXAPVKTSPINMLYF

SEQ ID NO: 10229 - protein, 15 aa, Artificial Sequence
  Cyclic GFR-binding peptide
  MOD_RES (1), (2): Xaa is C or S
XXAPTQLSPINVLYF

SEQ ID NO: 10230 - protein, 19 aa, Artificial Sequence
  Cyclic GFR-binding peptide
PARLSPINILYFDAANNVV

SEQ ID NO: 10231 - protein, 24 aa, Artificial Sequence
  Cyclic GFR-binding peptide
  MOD_RES (6), (7): Xaa is C or S
KASKAXXVPTKLSPINILYFDKGV

SEQ ID NO: 10232 - protein, 18 aa, Artificial Sequence
  Cyclic GFR-binding peptide
TKLSPINVLYFDSSNNVI

SEQ ID NO: 10233 - protein, 20 aa, Artificial Sequence
  Cyclic GFR-binding peptide
  MOD_RES (6), (7): Xaa is C or S
YVPKPXXAPTKLSPINVLYF

SEQ ID NO: 10234 - protein, 24 aa, Artificial Sequence
  Cyclic GFR-binding peptide
  MOD_RES (6), (7): Xaa is C or S
AVPKAXXAPTKLSPINVLYFDSSN

SEQ ID NO: 10235 - protein, 18 aa, Artificial Sequence
  Cyclic GFR-binding peptide
  MOD_RES (4), (5): Xaa is C or S
PASXXVPARLSPINILYF

SEQ ID NO: 10236 - protein, 26 aa, Artificial Sequence
  Cyclic GFR-binding peptide
  MOD_RES (6), (7): Xaa is C or S
STPPTXXVPTRLSPINILYFDSANNV

SEQ ID NO: 10237 - protein, 22 aa, Artificial Sequence
  Cyclic GFR-binding peptide
  MOD_RES (6), (7): Xaa is C or S
TVPKPXXAPTQLSPINVLYFDD

SEQ ID NO: 10238 - protein, 14 aa, Artificial Sequence
  Cyclic GFR-binding peptide
  MOD_RES (1), (1): Xaa is C or S
XAPVKTSPINMLYF

SEQ ID NO: 10239 - protein, 26 aa, Artificial Sequence
  Cyclic GFR-binding peptide
  MOD_RES (6), (7): Xaa is C or S
KASKAXXVPTKLSPINILYFDKGVVT

SEQ ID NO: 10240 - protein, 23 aa, Artificial Sequence
  Cyclic GFR-binding peptide
  MOD_RES (6), (7): Xaa is C or S
RVPSTXXAPVKTSPINMLYFDNG

SEQ ID NO: 10241 - protein, 26 aa, Artificial Sequence
  Cyclic GFR-binding peptide
  MOD_RES (6), (7): Xaa is C or S
AAPASXXVPARLSPINILYFDAANNV

SEQ ID NO: 10242 - protein, 21 aa, Artificial Sequence
  Cyclic GFR-binding peptide
  MOD_RES (7), (7): Xaa is C or S
HVTKPTXAPTKLSPINVLYFD

SEQ ID NO: 10243 - protein, 26 aa, Artificial Sequence
  Cyclic GFR-binding peptide
  MOD_RES (6), (7): Xaa is C or S
RVPSTXXAPVKTSPINMLYFDNGRVL

SEQ ID NO: 10244 - protein, 25 aa, Artificial Sequence
  Cyclic GFR-binding peptide
  MOD_RES (6), (7): Xaa is C or S
TVPKPXXAPTQLSPINVLYFDDSSN

SEQ ID NO: 10245 - protein, 18 aa, Artificial Sequence
  Cyclic GFR-binding peptide
VKTSPINMLYFDNGRVLL

SEQ ID NO: 10246 - protein, 23 aa, Artificial Sequence
  Cyclic GFR-binding peptide
  MOD_RES (6), (7): Xaa is C or S
STPPTXXVPTRLSPINILYFDSA

SEQ ID NO: 10247 - protein, 17 aa, Artificial Sequence
  Cyclic GFR-binding peptide
KLSPINILYFDKGVVTY

SEQ ID NO: 10248 - protein, 25 aa, Artificial Sequence
  Cyclic GFR-binding peptide
  MOD_RES (6), (7): Xaa is C or S
RVPSTXXAPVKTSPINMLYFDNGRV

SEQ ID NO: 10249 - protein, 18 aa, Artificial Sequence
  Cyclic GFR-binding peptide
TKLSPINILYFDKGVVTY

SEQ ID NO: 10250 - protein, 17 aa, Artificial Sequence
  Cyclic GFR-binding peptide
  MOD_RES (3), (4): Xaa is C or S
ASXXVPARLSPINILYF

SEQ ID NO: 10251 - protein, 17 aa, Artificial Sequence
  Cyclic GFR-binding peptide
KLSPINVLYFDSSNNVI

SEQ ID NO: 10252 - protein, 14 aa, Artificial Sequence
  Cyclic GFR-binding peptide
  MOD_RES (1), (1): Xaa is C or S
XAPTKLSPINVLYF

SEQ ID NO: 10253 - protein, 16 aa, Artificial Sequence
  Cyclic GFR-binding peptide
LSPINILYFDKGVVTY

SEQ ID NO: 10254 - protein, 24 aa, Artificial Sequence
  Cyclic GFR-binding peptide
  MOD_RES (6), (7): Xaa is C or S
AAPASXXVPARLSPINILYFDAAN

SEQ ID NO: 10255 - protein, 20 aa, Artificial Sequence
  Cyclic GFR-binding peptide
  MOD_RES (6), (7): Xaa is C or S
AVPKAXXAPTKLSPINVLYF

SEQ ID NO: 10256 - protein, 19 aa, Artificial Sequence
  Cyclic GFR-binding peptide
  MOD_RES (5), (6): Xaa is C or S
TPPTXXVPTRLSPINILYF

SEQ ID NO: 10257 - protein, 19 aa, Artificial Sequence
  Cyclic GFR-binding peptide
PTKLSPINVLYFDDMGVPT

SEQ ID NO: 10258 - protein, 27 aa, Artificial Sequence
  Cyclic GFR-binding peptide
  MOD_RES (6), (7): Xaa is C or S
YVPKPXXAPTKLSPINVLYFDDSSNVI

SEQ ID NO: 10259 - protein, 19 aa, Artificial Sequence
  Cyclic GFR-binding peptide
  MOD_RES (5), (6): Xaa is C or S
VPKPXXAPTKLSPINVLYF

SEQ ID NO: 10260 - protein, 19 aa, Artificial Sequence
  Cyclic GFR-binding peptide
  MOD_RES (5), (6): Xaa is C or S
ASKAXXVPTKLSPINILYF

SEQ ID NO: 10261 - protein, 17 aa, Artificial Sequence
  Cyclic GFR-binding peptide
  MOD_RES (3), (4): Xaa is C or S
KAXXVPTKLSPINVLYF

SEQ ID NO: 10262 - protein, 20 aa, Artificial Sequence
  Cyclic GFR-binding peptide
  MOD_RES (6), (7): Xaa is C or S
RVPSTXXAPVKTSPINMLYF

SEQ ID NO: 10263 - protein, 22 aa, Artificial Sequence
  Cyclic GFR-binding peptide
  MOD_RES (6), (7): Xaa is C or S
STPPTXXVPTRLSPINILYFDS

SEQ ID NO: 10264 - protein, 21 aa, Artificial Sequence
  Cyclic GFR-binding peptide
  MOD_RES (6), (7): Xaa is C or S
TVPKPXXAPTQLSPINVLYFD

SEQ ID NO: 10265 - protein, 16 aa, Artificial Sequence
  Cyclic GFR-binding peptide
  MOD_RES (2), (3): Xaa is C or S
AXXVPTELSPINMLYF

SEQ ID NO: 10266 - protein, 26 aa, Artificial Sequence
  Cyclic GFR-binding peptide
  MOD_RES (6), (7): Xaa is C or S
SIPKAXXVPTELSPINMLYFDEYDKV

SEQ ID NO: 10267 - protein, 25 aa, Artificial Sequence
  Cyclic GFR-binding peptide
  MOD_RES (6), (7): Xaa is C or S
HVPKPXXAPTKLSPINVLYFDDSSN

SEQ ID NO: 10268 - protein, 25 aa, Artificial Sequence
  Cyclic GFR-binding peptide
  MOD_RES (6), (7): Xaa is C or S
SIPKAXXVPTELSPINMLYFDEYDK

SEQ ID NO: 10269 - protein, 13 aa, Artificial Sequence
  Cyclic GFR-binding peptide
APTKLSPINVLYF

SEQ ID NO: 10270 - protein, 26 aa, Artificial Sequence
  Cyclic GFR-binding peptide
  MOD_RES (6), (7): Xaa is C or S
HVPKPXXAPTKLSPINVLYFDDSSNV

SEQ ID NO: 10271 - protein, 21 aa, Artificial Sequence
  Cyclic GFR-binding peptide
  MOD_RES (6), (7): Xaa is C or S
STPPTXXVPTRLSPINILYFD

SEQ ID NO: 10272 - protein, 14 aa, Artificial Sequence
  Cyclic GFR-binding peptide
  MOD_RES (1), (1): Xaa is C or S
XVPTKLSPINILYF

SEQ ID NO: 10273 - protein, 27 aa, Artificial Sequence
  Cyclic GFR-binding peptide
  MOD_RES (6), (7): Xaa is C or S
AVPKAXXAPTKLSPINVLYFDSSNNVI

SEQ ID NO: 10274 - protein, 16 aa, Artificial Sequence
  Cyclic GFR-binding peptide
  MOD_RES (2), (3): Xaa is C or S
SXXVPARLSPINILYF

SEQ ID NO: 10275 - protein, 15 aa, Artificial Sequence
  Cyclic GFR-binding peptide
  MOD_RES (1), (2): Xaa is C or S
XXAPVKTSPINMLYF

SEQ ID NO: 10276 - protein, 21 aa, Artificial Sequence
  Cyclic GFR-binding peptide
  MOD_RES (6), (7): Xaa is C or S
AAPASXXVPARLSPINILYFD

SEQ ID NO: 10277 - protein, 14 aa, Artificial Sequence
  Cyclic GFR-binding peptide
  MOD_RES (1), (1): Xaa is C or S
XAPTQLSPINVLYF

SEQ ID NO: 10278 - protein, 27 aa, Artificial Sequence
  Cyclic GFR-binding peptide
  MOD_RES (6), (7): Xaa is C or S
KASKAXXVPTKLSPINILYFDKGVVTY

SEQ ID NO: 10279 - protein, 19 aa, Artificial Sequence
  Cyclic GFR-binding peptide
  MOD_RES (5), (6): Xaa is C or S
IPKAXXVPTELSPINMLYF

SEQ ID NO: 10280 - protein, 27 aa, Artificial Sequence
  Cyclic GFR-binding peptide
  MOD_RES (6), (7): Xaa is C or S
SIPKAXXVPTELSPINMLYFDEYDKVV

SEQ ID NO: 10281 - protein, 21 aa, Artificial Sequence
  Cyclic GFR-binding peptide
  MOD_RES (6), (7): Xaa is C or S
KVGKAXXVPTKLSPINVLYFD

SEQ ID NO: 10282 - protein, 23 aa, Artificial Sequence
  Cyclic GFR-binding peptide
  MOD_RES (7), (7): Xaa is C or S
HVTKPTXAPTKLSPINVLYFDDS

SEQ ID NO: 10283 - protein, 20 aa, Artificial Sequence
  Cyclic GFR-binding peptide
  MOD_RES (6), (7): Xaa is C or S
AAPASXXVPARLSPINILYF

SEQ ID NO: 10284 - protein, 13 aa, Artificial Sequence
  Cyclic GFR-binding peptide
VPTKLSPINVLYF

SEQ ID NO: 10285 - protein, 18 aa, Artificial Sequence
  Cyclic GFR-binding peptide
TELSPINMLYFDENEKVV

SEQ ID NO: 10286 - protein, 26 aa, Artificial Sequence
  Cyclic GFR-binding peptide
  MOD_RES (6), (7): Xaa is C or S
AVPKAXXAPTKLSPINVLYFDSSNNV

SEQ ID NO: 10287 - protein, 15 aa, Artificial Sequence
  Cyclic GFR-binding peptide
SPINVLYFDDMGVPT

SEQ ID NO: 10288 - protein, 17 aa, Artificial Sequence
  Cyclic GFR-binding peptide
RLSPINILYFDSANNVV

SEQ ID NO: 10289 - protein, 14 aa, Artificial Sequence
  Cyclic GFR-binding peptide
  MOD_RES (1), (1): Xaa is C or S
XVPTRLSPINILYF

SEQ ID NO: 10290 - protein, 17 aa, Artificial Sequence
  Cyclic GFR-binding peptide
  MOD_RES (4), (4): Xaa is C or S
KPTXAPTKLSPINVLYF

SEQ ID NO: 10291 - protein, 20 aa, Artificial Sequence
  Cyclic GFR-binding peptide
  MOD_RES (6), (7): Xaa is C or S
KASKAXXVPTKLSPINILYF

SEQ ID NO: 10292 - protein, 20 aa, Artificial Sequence
  Cyclic GFR-binding peptide
  MOD_RES (6), (7): Xaa is C or S
SIPKAXXVPTELSPINMLYF

SEQ ID NO: 10293 - protein, 17 aa, Artificial Sequence
  Cyclic GFR-binding peptide
  MOD_RES (3), (4): Xaa is C or S
PTXXVPTRLSPINILYF

SEQ ID NO: 10294 - protein, 16 aa, Artificial Sequence
  Cyclic GFR-binding peptide
  MOD_RES (2), (3): Xaa is C or S
TXXAPVKTSPINMLYF

SEQ ID NO: 10295 - protein, 15 aa, Artificial Sequence
  Cyclic GFR-binding peptide
SPINMLYFDEYDKVV

SEQ ID NO: 10296 - protein, 18 aa, Artificial Sequence
  Cyclic GFR-binding peptide
  MOD_RES (4), (5): Xaa is C or S
PKAXXVPTELSPINMLYF

SEQ ID NO: 10297 - protein, 16 aa, Artificial Sequence
  Cyclic GFR-binding peptide
LSPINILYFDAANNVV

SEQ ID NO: 10298 - protein, 16 aa, Artificial Sequence
  Cyclic GFR-binding peptide
  MOD_RES (2), (3): Xaa is C or S
PXXAPTKLSPINVLYF

SEQ ID NO: 10299 - protein, 15 aa, Artificial Sequence
  Cyclic GFR-binding peptide
SPINMLYFDENEKVV

SEQ ID NO: 10300 - protein, 19 aa, Artificial Sequence
  Cyclic GFR-binding peptide
  MOD_RES (5), (6): Xaa is C or S
VPKAXXAPTKLSPINVLYF

SEQ ID NO: 10301 - protein, 13 aa, Artificial Sequence
  Cyclic GFR-binding peptide
APVKTSPINMLYF

SEQ ID NO: 10302 - protein, 24 aa, Artificial Sequence
  Cyclic GFR-binding peptide
  MOD_RES (6), (7): Xaa is C or S
RVPSTXXAPVKTSPINMLYFDNGR

SEQ ID NO: 10303 - protein, 19 aa, Artificial Sequence
  Cyclic GFR-binding peptide
PTKLSPINILYFDKGVVTY

SEQ ID NO: 10304 - protein, 24 aa, Artificial Sequence
  Cyclic GFR-binding peptide
  MOD_RES (6), (7): Xaa is C or S
SIPKAXXVPTELSPINMLYFDEYD

SEQ ID NO: 10305 - protein, 18 aa, Artificial Sequence
  Cyclic GFR-binding peptide
TKLSPINVLYFDDMGVPT

SEQ ID NO: 10306 - protein, 16 aa, Artificial Sequence
  Cyclic GFR-binding peptide
TSPINMLYFDNGRVLL

SEQ ID NO: 10307 - protein, 19 aa, Artificial Sequence
  Cyclic GFR-binding peptide
PTKLSPINVLYFDSSNNVI

SEQ ID NO: 10308 - protein, 23 aa, Artificial Sequence
  Cyclic GFR-binding peptide
  MOD_RES (6), (7): Xaa is C or S
SIPKAXXVPTELSPINMLYFDEY

SEQ ID NO: 10309 - protein, 19 aa, Artificial Sequence
  Cyclic GFR-binding peptide
PTKLSPINVLYFDDSSNVI

SEQ ID NO: 10310 - protein, 14 aa, Artificial Sequence
  Cyclic GFR-binding peptide
  MOD_RES (1), (1): Xaa is C or S
XVPTELSPINMLYF

SEQ ID NO: 10311 - protein, 19 aa, Artificial Sequence
  Cyclic GFR-binding peptide
  MOD_RES (5), (6): Xaa is C or S
VPKPXXAPTQLSPINVLYF

SEQ ID NO: 10312 - protein, 16 aa, Artificial Sequence
  Cyclic GFR-binding peptide
LSPINILYFDSANNVV

SEQ ID NO: 10313 - protein, 16 aa, Artificial Sequence
  Cyclic GFR-binding peptide
  MOD_RES (2), (3): Xaa is C or S
AXXVPTKLSPINVLYF

SEQ ID NO: 10314 - protein, 19 aa, Artificial Sequence
  Cyclic GFR-binding peptide
PTQLSPINVLYFDDSSNVI

SEQ ID NO: 10315 - protein, 24 aa, Artificial Sequence
  Cyclic GFR-binding peptide
  MOD_RES (6), (7): Xaa is C or S
KIPKAXXVPTELSPINMLYFDENE

SEQ ID NO: 10316 - protein, 18 aa, Artificial Sequence
  Cyclic GFR-binding peptide
  MOD_RES (4), (5): Xaa is C or S
PKPXXAPTKLSPINVLYF

SEQ ID NO: 10317 - protein, 25 aa, Artificial Sequence
  Cyclic GFR-binding peptide
  MOD_RES (6), (7): Xaa is C or S
AAPASXXVPARLSPINILYFDAANN

SEQ ID NO: 10318 - protein, 19 aa, Artificial Sequence
  Cyclic GFR-binding peptide
PTELSPINMLYFDEYDKVV

SEQ ID NO: 10319 - protein, 19 aa, Artificial Sequence
  Cyclic GFR-binding peptide
PTRLSPINILYFDSANNVV

SEQ ID NO: 10320 - protein, 23 aa, Artificial Sequence
  Cyclic GFR-binding peptide
  MOD_RES (6), (7): Xaa is C or S
KVGKAXXVPTKLSPINVLYFDDM

SEQ ID NO: 10321 - protein, 18 aa, Artificial Sequence
  Cyclic GFR-binding peptide
  MOD_RES (4), (5): Xaa is C or S
SKAXXVPTKLSPINILYF

SEQ ID NO: 10322 - protein, 13 aa, Artificial Sequence
  Cyclic GFR-binding peptide
VPTELSPINMLYF

SEQ ID NO: 10323 - protein, 24 aa, Artificial Sequence
  Cyclic GFR-binding peptide
  MOD_RES (6), (7): Xaa is C or S
STPPTXXVPTRLSPINILYFDSAN

SEQ ID NO: 10324 - protein, 16 aa, Artificial Sequence
  Cyclic GFR-binding peptide
  MOD_RES (2), (3): Xaa is C or S
AXXVPTKLSPINILYF

SEQ ID NO: 10325 - protein, 22 aa, Artificial Sequence
  Cyclic GFR-binding peptide
  MOD_RES (6), (7): Xaa is C or S
SIPKAXXVPTELSPINMLYFDE

SEQ ID NO: 10326 - protein, 16 aa, Artificial Sequence
  Cyclic GFR-binding peptide
LSPINVLYFDDSSNVI

SEQ ID NO: 10327 - protein, 21 aa, Artificial Sequence
  Cyclic GFR-binding peptide
  MOD_RES (6), (7): Xaa is C or S
YVPKPXXAPTKLSPINVLYFD

SEQ ID NO: 10328 - protein, 15 aa, Artificial Sequence
  Cyclic GFR-binding peptide
  MOD_RES (1), (2): Xaa is C or S
XXVPTKLSPINVLYF

SEQ ID NO: 10329 - protein, 23 aa, Artificial Sequence
  Cyclic GFR-binding peptide
  MOD_RES (6), (7): Xaa is C or S
AVPKAXXAPTKLSPINVLYFDSS

SEQ ID NO: 10330 - protein, 15 aa, Artificial Sequence
  Cyclic GFR-binding peptide
SPINVLYFDDSSNVI

SEQ ID NO: 10331 - protein, 15 aa, Artificial Sequence
  Cyclic GFR-binding peptide
  MOD_RES (1), (2): Xaa is C or S
XXAPTKLSPINVLYF

SEQ ID NO: 10332 - protein, 26 aa, Artificial Sequence
  Cyclic GFR-binding peptide
  MOD_RES (7), (7): Xaa is C or S
HVTKPTXAPTKLSPINVLYFDDSSNV

SEQ ID NO: 10333 - protein, 17 aa, Artificial Sequence
  Cyclic GFR-binding peptide
RLSPINILYFDAANNVV

SEQ ID NO: 10334 - protein, 21 aa, Artificial Sequence
  Cyclic GFR-binding peptide
  MOD_RES (6), (7): Xaa is C or S
AVPKAXXAPTKLSPINVLYFD

SEQ ID NO: 10335 - protein, 21 aa, Artificial Sequence
  Cyclic GFR-binding peptide
  MOD_RES (6), (7): Xaa is C or S
HVPKPXXAPTKLSPINVLYFD

SEQ ID NO: 10336 - protein, 18 aa, Artificial Sequence
  Cyclic GFR-binding peptide
TRLSPINILYFDSANNVV

SEQ ID NO: 10337 - protein, 17 aa, Artificial Sequence
  Cyclic GFR-binding peptide
  MOD_RES (3), (4): Xaa is C or S
STXXAPVKTSPINMLYF

SEQ ID NO: 10338 - protein, 15 aa, Artificial Sequence
  Cyclic GFR-binding peptide
  MOD_RES (2), (2): Xaa is C or S
TXAPTKLSPINVLYF

SEQ ID NO: 10339 - protein, 27 aa, Artificial Sequence
  Cyclic GFR-binding peptide
  MOD_RES (6), (7): Xaa is C or S
HVPKPXXAPTKLSPINVLYFDDSSNVI

SEQ ID NO: 10340 - protein, 26 aa, Artificial Sequence
  Cyclic GFR-binding peptide
  MOD_RES (6), (7): Xaa is C or S
KIPKAXXVPTELSPINMLYFDENEKV

SEQ ID NO: 10341 - protein, 23 aa, Artificial Sequence
  Cyclic GFR-binding peptide
  MOD_RES (6), (7): Xaa is C or S
KIPKAXXVPTELSPINMLYFDEN

SEQ ID NO: 10342 - protein, 16 aa, Artificial Sequence
  Cyclic GFR-binding peptide
  MOD_RES (2), (3): Xaa is C or S
PXXAPTQLSPINVLYF

SEQ ID NO: 10343 - protein, 24 aa, Artificial Sequence
  Cyclic GFR-binding peptide
  MOD_RES (6), (7): Xaa is C or S
KVGKAXXVPTKLSPINVLYFDDMG

SEQ ID NO: 10344 - protein, 22 aa, Artificial Sequence
  Cyclic GFR-binding peptide
  MOD_RES (6), (7): Xaa is C or S
KASKAXXVPTKLSPINILYFDK

SEQ ID NO: 10345 - protein, 18 aa, Artificial Sequence
  Cyclic GFR-binding peptide
  MOD_RES (4), (5): Xaa is C or S
PKAXXAPTKLSPINVLYF

SEQ ID NO: 10346 - protein, 19 aa, Artificial Sequence
  Cyclic GFR-binding peptide
  MOD_RES (5), (6): Xaa is C or S
APASXXVPARLSPINILYF

SEQ ID NO: 10347 - protein, 25 aa, Artificial Sequence
  Cyclic GFR-binding peptide
  MOD_RES (6), (7): Xaa is C or S
KVGKAXXVPTKLSPINVLYFDDMGV

SEQ ID NO: 10348 - protein, 24 aa, Artificial Sequence
  Cyclic GFR-binding peptide
  MOD_RES (7), (7): Xaa is C or S
HVTKPTXAPTKLSPINVLYFDDSS

SEQ ID NO: 10349 - protein, 17 aa, Artificial Sequence
  Cyclic GFR-binding peptide
  MOD_RES (3), (4): Xaa is C or S
KAXXVPTKLSPINILYF

SEQ ID NO: 10350 - protein, 16 aa, Artificial Sequence
  Cyclic GFR-binding peptide
LSPINMLYFDEYDKVV

SEQ ID NO: 10351 - protein, 22 aa, Artificial Sequence
  Cyclic GFR-binding peptide
  MOD_RES (6), (7): Xaa is C or S
HVPKPXXAPTKLSPINVLYFDD

SEQ ID NO: 10352 - protein, 17 aa, Artificial Sequence
  Cyclic GFR-binding peptide
QLSPINVLYFDDSSNVI

SEQ ID NO: 10353 - protein, 17 aa, Artificial Sequence
  Cyclic GFR-binding peptide
  MOD_RES (3), (4): Xaa is C or S
KPXXAPTKLSPINVLYF

SEQ ID NO: 10354 - protein, 27 aa, Artificial Sequence
  Cyclic GFR-binding peptide
  MOD_RES (6), (7): Xaa is C or S
TVPKPXXAPTQLSPINVLYFDDSSNVI

SEQ ID NO: 10355 - protein, 20 aa, Artificial Sequence
  Cyclic GFR-binding peptide
  MOD_RES (6), (7): Xaa is C or S
STPPTXXVPTRLSPINILYF

SEQ ID NO: 10356 - protein, 27 aa, Artificial Sequence
  Cyclic GFR-binding peptide
  MOD_RES (6), (7): Xaa is C or S
RVPSTXXAPVKTSPINMLYFDNGRVLL

SEQ ID NO: 10357 - protein, 17 aa, Artificial Sequence
  Cyclic GFR-binding peptide
ELSPINMLYFDEYDKVV

SEQ ID NO: 10358 - protein, 21 aa, Artificial Sequence
  Cyclic GFR-binding peptide
  MOD_RES (6), (7): Xaa is C or S
KASKAXXVPTKLSPINILYFD

SEQ ID NO: 10359 - protein, 19 aa, Artificial Sequence
  Cyclic GFR-binding peptide
  MOD_RES (5), (6): Xaa is C or S
VGKAXXVPTKLSPINVLYF

SEQ ID NO: 10360 - protein, 18 aa, Artificial Sequence
  Cyclic GFR-binding peptide
TQLSPINVLYFDDSSNVI

SEQ ID NO: 10361 - protein, 15 aa, Artificial Sequence
  Cyclic GFR-binding peptide
SPINILYFDAANNVV

SEQ ID NO: 10362 - protein, 18 aa, Artificial Sequence
  Cyclic GFR-binding peptide
TKLSPINVLYFDDSSNVI

SEQ ID NO: 10363 - protein, 18 aa, Artificial Sequence
  Cyclic GFR-binding peptide
TELSPINMLYFDEYDKVV

SEQ ID NO: 10364 - protein, 15 aa, Artificial Sequence
  Cyclic GFR-binding peptide
SPINILYFDSANNVV

SEQ ID NO: 10365 - protein, 20 aa, Artificial Sequence
  Cyclic GFR-binding peptide
  MOD_RES (7), (7): Xaa is C or S
HVTKPTXAPTKLSPINVLYF

SEQ ID NO: 10366 - protein, 22 aa, Artificial Sequence
  Cyclic GFR-binding peptide
  MOD_RES (6), (7): Xaa is C or S
RVPSTXXAPVKTSPINMLYFDN

SEQ ID NO: 10367 - protein, 14 aa, Artificial Sequence
  Cyclic GFR-binding peptide
  MOD_RES (1), (1): Xaa is C or S
XVPARLSPINILYF

SEQ ID NO: 10368 - protein, 22 aa, Artificial Sequence
  Cyclic GFR-binding peptide
  MOD_RES (6), (7): Xaa is C or S
AVPKAXXAPTKLSPINVLYFDS

SEQ ID NO: 10369 - protein, 25 aa, Artificial Sequence
  Cyclic GFR-binding peptide
  MOD_RES (19), (20): Xaa is C or S
VRGNDIYLMSIPSTKVPAXXTSPVR

SEQ ID NO: 10370 - protein, 20 aa, Artificial Sequence
  Cyclic GFR-binding peptide
  MOD_RES (14), (15): Xaa is C or S
IYLMSIPSMKTPTXXPGASG

SEQ ID NO: 10371 - protein, 23 aa, Artificial Sequence
  Cyclic GFR-binding peptide
  MOD_RES (17), (18): Xaa is C or S
KDNIYLMSIPSMKTPTXXPGASG

SEQ ID NO: 10372 - protein, 15 aa, Artificial Sequence
  Cyclic GFR-binding peptide
  MOD_RES (14), (15): Xaa is C or S
IYLMSIPSTKVPAXX

SEQ ID NO: 10373 - protein, 23 aa, Artificial Sequence
  Cyclic GFR-binding peptide
  MOD_RES (17), (18): Xaa is C or S
SDDIYLVSIPSLKTPAXXPKPVH

SEQ ID NO: 10374 - protein, 19 aa, Artificial Sequence
  Cyclic GFR-binding peptide
VVNNASDIYLISIPSLRTP

SEQ ID NO: 10375 - protein, 25 aa, Artificial Sequence
  Cyclic GFR-binding peptide
  MOD_RES (19), (20): Xaa is C or S
QQKDNIYLMSIPSMKTPTXXPGASG

SEQ ID NO: 10376 - protein, 21 aa, Artificial Sequence
  Cyclic GFR-binding peptide
  MOD_RES (15), (16): Xaa is C or S
DIYLISIPSLRTPVXXTPPTS

SEQ ID NO: 10377 - protein, 17 aa, Artificial Sequence
  Cyclic GFR-binding peptide
  MOD_RES (14), (15): Xaa is C or S
IYLMSIPSMKTPTXXPG

SEQ ID NO: 10378 - protein, 14 aa, Artificial Sequence
  Cyclic GFR-binding peptide
  MOD_RES (14), (14): Xaa is C or S
IYLMSIPSTKVPAX

SEQ ID NO: 10379 - protein, 19 aa, Artificial Sequence
  Cyclic GFR-binding peptide
  MOD_RES (14), (15): Xaa is C or S
IYLISIPSLRTPVXXTPPT

SEQ ID NO: 10380 - protein, 17 aa, Artificial Sequence
  Cyclic GFR-binding peptide
LLVRGNDIYLMSIPSTK

SEQ ID NO: 10381 - protein, 27 aa, Artificial Sequence
  Cyclic GFR-binding peptide
  MOD_RES (21), (22): Xaa is C or S
VVNNASDIYLISIPSLRTPVXXTPPTS

SEQ ID NO: 10382 - protein, 20 aa, Artificial Sequence
  Cyclic GFR-binding peptide
  MOD_RES (14), (15): Xaa is C or S
IYLVSIPSLKTPAXXPKPVH

SEQ ID NO: 10383 - protein, 26 aa, Artificial Sequence
  Cyclic GFR-binding peptide
  MOD_RES (20), (21): Xaa is C or S
VNSSDDIYLVSIPSLKTPAXXPKPVH

SEQ ID NO: 10384 - protein, 16 aa, Artificial Sequence
  Cyclic GFR-binding peptide
VVNNASDIYLISIPSL

SEQ ID NO: 10385 - protein, 22 aa, Artificial Sequence
  Cyclic GFR-binding peptide
  MOD_RES (16), (17): Xaa is C or S
SDIYLISIPSLRTPVXXTPPTS

SEQ ID NO: 10386 - protein, 20 aa, Artificial Sequence
  Cyclic GFR-binding peptide
  MOD_RES (14), (15): Xaa is C or S
IYLMSIPSTKVPAXXTSPVR

SEQ ID NO: 10387 - protein, 22 aa, Artificial Sequence
  Cyclic GFR-binding peptide
  MOD_RES (16), (17): Xaa is C or S
DNIYLMSIPSMKTPTXXPGASG

SEQ ID NO: 10388 - protein, 25 aa, Artificial Sequence
  Cyclic GFR-binding peptide
  MOD_RES (19), (20): Xaa is C or S
NNASDIYLISIPSLRTPVXXTPPTS

SEQ ID NO: 10389 - protein, 27 aa, Artificial Sequence
  Cyclic GFR-binding peptide
  MOD_RES (21), (22): Xaa is C or S
IVNSSDDIYLVSIPSLKTPAXXPKPVH

SEQ ID NO: 10390 - protein, 16 aa, Artificial Sequence
  Cyclic GFR-binding peptide
  MOD_RES (14), (15): Xaa is C or S
IYLMSIPSMKTPTXXP

SEQ ID NO: 10391 - protein, 18 aa, Artificial Sequence
  Cyclic GFR-binding peptide
  MOD_RES (14), (15): Xaa is C or S
IYLISIPSLRTPVXXTPP

SEQ ID NO: 10392 - protein, 15 aa, Artificial Sequence
  Cyclic GFR-binding peptide
  MOD_RES (14), (15): Xaa is C or S
IYLISIPSLRTPVXX

SEQ ID NO: 10393 - protein, 19 aa, Artificial Sequence
  Cyclic GFR-binding peptide
IIQQKDNIYLMSIPSMKTP

SEQ ID NO: 10394 - protein, 24 aa, Artificial Sequence
  Cyclic GFR-binding peptide
  MOD_RES (18), (19): Xaa is C or S
RGNDIYLMSIPSTKVPAXXTSPVR

SEQ ID NO: 10395 - protein, 13 aa, Artificial Sequence
  Cyclic GFR-binding peptide
IYLISIPSLRTPV

SEQ ID NO: 10396 - protein, 27 aa, Artificial Sequence
  Cyclic GFR-binding peptide
  MOD_RES (21), (22): Xaa is C or S
LLVRGNDIYLMSIPSTKVPAXXTSPVR

SEQ ID NO: 10397 - protein, 20 aa, Artificial Sequence
  Cyclic GFR-binding peptide
  MOD_RES (14), (15): Xaa is C or S
IYLISIPSLRTPVXXTPPTS

SEQ ID NO: 10398 - protein, 13 aa, Artificial Sequence
  Cyclic GFR-binding peptide
IYLMSIPSTKVPA

SEQ ID NO: 10399 - protein, 17 aa, Artificial Sequence
  Cyclic GFR-binding peptide
VVNNASDIYLISIPSLR

SEQ ID NO: 10400 - protein, 21 aa, Artificial Sequence
  Cyclic GFR-binding peptide
  MOD_RES (15), (16): Xaa is C or S
DIYLVSIPSLKTPAXXPKPVH

SEQ ID NO: 10401 - protein, 19 aa, Artificial Sequence
  Cyclic GFR-binding peptide
LLVRGNDIYLMSIPSTKVP

SEQ ID NO: 10402 - protein, 22 aa, Artificial Sequence
  Cyclic GFR-binding peptide
  MOD_RES (16), (17): Xaa is C or S
DDIYLVSIPSLKTPAXXPKPVH

SEQ ID NO: 10403 - protein, 17 aa, Artificial Sequence
  Cyclic GFR-binding peptide
IIQQKDNIYLMSIPSMK

SEQ ID NO: 10404 - protein, 16 aa, Artificial Sequence
  Cyclic GFR-binding peptide
IIQQKDNIYLMSIPSM

SEQ ID NO: 10405 - protein, 17 aa, Artificial Sequence
  Cyclic GFR-binding peptide
  MOD_RES (14), (15): Xaa is C or S
IYLISIPSLRTPVXXTP

SEQ ID NO: 10406 - protein, 22 aa, Artificial Sequence
  Cyclic GFR-binding peptide
  MOD_RES (16), (17): Xaa is C or S
NDIYLMSIPSTKVPAXXTSPVR

SEQ ID NO: 10407 - protein, 19 aa, Artificial Sequence
  Cyclic GFR-binding peptide
  MOD_RES (14), (15): Xaa is C or S
IYLMSIPSMKTPTXXPGAS

SEQ ID NO: 10408 - protein, 14 aa, Artificial Sequence
  Cyclic GFR-binding peptide
  MOD_RES (14), (14): Xaa is C or S
IYLISIPSLRTPVX

SEQ ID NO: 10409 - protein, 24 aa, Artificial Sequence
  Cyclic GFR-binding peptide
  MOD_RES (18), (19): Xaa is C or S
SSDDIYLVSIPSLKTPAXXPKPVH

SEQ ID NO: 10410 - protein, 26 aa, Artificial Sequence
  Cyclic GFR-binding peptide
  MOD_RES (20), (21): Xaa is C or S
IQQKDNIYLMSIPSMKTPTXXPGASG

SEQ ID NO: 10411 - protein, 15 aa, Artificial Sequence
  Cyclic GFR-binding peptide
VVNNASDIYLISIPS

SEQ ID NO: 10412 - protein, 25 aa, Artificial Sequence
  Cyclic GFR-binding peptide
  MOD_RES (19), (20): Xaa is C or S
NSSDDIYLVSIPSLKTPAXXPKPVH

SEQ ID NO: 10413 - protein, 13 aa, Artificial Sequence
  Cyclic GFR-binding peptide
IYLMSIPSMKTPT

SEQ ID NO: 10414 - protein, 24 aa, Artificial Sequence
  Cyclic GFR-binding peptide
  MOD_RES (18), (19): Xaa is C or S
NASDIYLISIPSLRTPVXXTPPTS

SEQ ID NO: 10415 - protein, 16 aa, Artificial Sequence
  Cyclic GFR-binding peptide
LLVRGNDIYLMSIPST

SEQ ID NO: 10416 - protein, 19 aa, Artificial Sequence
  Cyclic GFR-binding peptide
  MOD_RES (14), (15): Xaa is C or S
IYLMSIPSTKVPAXXTSPV

SEQ ID NO: 10417 - protein, 15 aa, Artificial Sequence
  Cyclic GFR-binding peptide
IIQQKDNIYLMSIPS

SEQ ID NO: 10418 - protein, 27 aa, Artificial Sequence
  Cyclic GFR-binding peptide
  MOD_RES (21), (22): Xaa is C or S
IIQQKDNIYLMSIPSMKTPTXXPGASG

SEQ ID NO: 10419 - protein, 21 aa, Artificial Sequence
  Cyclic GFR-binding peptide
  MOD_RES (15), (16): Xaa is C or S
NIYLMSIPSMKTPTXXPGASG

SEQ ID NO: 10420 - protein, 18 aa, Artificial Sequence
  Cyclic GFR-binding peptide
  MOD_RES (14), (15): Xaa is C or S
IYLMSIPSTKVPAXXTSP

SEQ ID NO: 10421 - protein, 15 aa, Artificial Sequence
  Cyclic GFR-binding peptide
  MOD_RES (14), (15): Xaa is C or S
IYLMSIPSMKTPTXX

SEQ ID NO: 10422 - protein, 21 aa, Artificial Sequence
  Cyclic GFR-binding peptide
  MOD_RES (15), (16): Xaa is C or S
DIYLMSIPSTKVPAXXTSPVR

SEQ ID NO: 10423 - protein, 18 aa, Artificial Sequence
  Cyclic GFR-binding peptide
LLVRGNDIYLMSIPSTKV

SEQ ID NO: 10424 - protein, 16 aa, Artificial Sequence
  Cyclic GFR-binding peptide
  MOD_RES (14), (15): Xaa is C or S
IYLISIPSLRTPVXXT

SEQ ID NO: 10425 - protein, 26 aa, Artificial Sequence
  Cyclic GFR-binding peptide
  MOD_RES (20), (21): Xaa is C or S
LVRGNDIYLMSIPSTKVPAXXTSPVR

SEQ ID NO: 10426 - protein, 18 aa, Artificial Sequence
  Cyclic GFR-binding peptide
  MOD_RES (14), (15): Xaa is C or S
IYLMSIPSMKTPTXXPGA

SEQ ID NO: 10427 - protein, 15 aa, Artificial Sequence
  Cyclic GFR-binding peptide
LLVRGNDIYLMSIPS

SEQ ID NO: 10428 - protein, 26 aa, Artificial Sequence
  Cyclic GFR-binding peptide
  MOD_RES (20), (21): Xaa is C or S
VNNASDIYLISIPSLRTPVXXTPPTS

SEQ ID NO: 10429 - protein, 16 aa, Artificial Sequence
  Cyclic GFR-binding peptide
  MOD_RES (14), (15): Xaa is C or S
IYLMSIPSTKVPAXXT

SEQ ID NO: 10430 - protein, 18 aa, Artificial Sequence
  Cyclic GFR-binding peptide
VVNNASDIYLISIPSLRT

SEQ ID NO: 10431 - protein, 23 aa, Artificial Sequence
  Cyclic GFR-binding peptide
  MOD_RES (17), (18): Xaa is C or S
ASDIYLISIPSLRTPVXXTPPTS

SEQ ID NO: 10432 - protein, 18 aa, Artificial Sequence
  Cyclic GFR-binding peptide
IIQQKDNIYLMSIPSMKT

SEQ ID NO: 10433 - protein, 23 aa, Artificial Sequence
  Cyclic GFR-binding peptide
  MOD_RES (17), (18): Xaa is C or S
GNDIYLMSIPSTKVPAXXTSPVR

SEQ ID NO: 10434 - protein, 17 aa, Artificial Sequence
  Cyclic GFR-binding peptide
  MOD_RES (14), (15): Xaa is C or S
IYLMSIPSTKVPAXXTS

SEQ ID NO: 10435 - protein, 24 aa, Artificial Sequence
  Cyclic GFR-binding peptide
  MOD_RES (18), (19): Xaa is C or S
QKDNIYLMSIPSMKTPTXXPGASG

SEQ ID NO: 10436 - protein, 14 aa, Artificial Sequence
  Cyclic GFR-binding peptide
  MOD_RES (14), (14): Xaa is C or S
IYLMSIPSMKTPTX

SEQ ID NO: 10437 - protein, 25 aa, Artificial Sequence
  Cyclic GFR-binding peptide
  MOD_RES (6), (7): Xaa is C or S
RVPSTXXAPVKTSPISMLYIDNGRV

SEQ ID NO: 10438 - protein, 20 aa, Artificial Sequence
  Cyclic GFR-binding peptide
  MOD_RES (6), (7): Xaa is C or S
GSAGPXXTPTKMSPISMLYI

SEQ ID NO: 10439 - protein, 23 aa, Artificial Sequence
  Cyclic GFR-binding peptide
  MOD_RES (6), (7): Xaa is C or S
GSAGPXXTPTKMSPISMLYINDK

SEQ ID NO: 10440 - protein, 15 aa, Artificial Sequence
  Cyclic GFR-binding peptide
  MOD_RES (1), (2): Xaa is C or S
XXAPVKTSPISMLYI

SEQ ID NO: 10441 - protein, 23 aa, Artificial Sequence
  Cyclic GFR-binding peptide
  MOD_RES (6), (7): Xaa is C or S
HVPKPXXAPTKLSPISVLYIDDS

SEQ ID NO: 10442 - protein, 19 aa, Artificial Sequence
  Cyclic GFR-binding peptide
PTRLSPISILYIDSANNVV

SEQ ID NO: 10443 - protein, 25 aa, Artificial Sequence
  Cyclic GFR-binding peptide
  MOD_RES (6), (7): Xaa is C or S
GSAGPXXTPTKMSPISMLYINDKQQ

SEQ ID NO: 10444 - protein, 21 aa, Artificial Sequence
  Cyclic GFR-binding peptide
  MOD_RES (6), (7): Xaa is C or S
STPPTXXVPTRLSPISILYID

SEQ ID NO: 10445 - protein, 17 aa, Artificial Sequence
  Cyclic GFR-binding peptide
  MOD_RES (3), (4): Xaa is C or S
GPXXTPTKMSPISMLYI

SEQ ID NO: 10446 - protein, 14 aa, Artificial Sequence
  Cyclic GFR-binding peptide
  MOD_RES (1), (1): Xaa is C or S
XAPVKTSPISMLYI

SEQ ID NO: 10447 - protein, 19 aa, Artificial Sequence
  Cyclic GFR-binding peptide
  MOD_RES (5), (6): Xaa is C or S
TPPTXXVPTRLSPISILYI

SEQ ID NO: 10448 - protein, 17 aa, Artificial Sequence
  Cyclic GFR-binding peptide
KTSPISMLYIDNGRVLL

SEQ ID NO: 10449 - protein, 27 aa, Artificial Sequence
  Cyclic GFR-binding peptide
  MOD_RES (6), (7): Xaa is C or S
STPPTXXVPTRLSPISILYIDSANNVV

SEQ ID NO: 10450 - protein, 20 aa, Artificial Sequence
  Cyclic GFR-binding peptide
  MOD_RES (6), (7): Xaa is C or S
HVPKPXXAPTKLSPISVLYI

SEQ ID NO: 10451 - protein, 26 aa, Artificial Sequence
  Cyclic GFR-binding peptide
  MOD_RES (6), (7): Xaa is C or S
HVPKPXXAPTKLSPISVLYIDDSSNV

SEQ ID NO: 10452 - protein, 16 aa, Artificial Sequence
  Cyclic GFR-binding peptide
LSPISILYIDSANNVV

SEQ ID NO: 10453 - protein, 22 aa, Artificial Sequence
  Cyclic GFR-binding peptide
  MOD_RES (6), (7): Xaa is C or S
STPPTXXVPTRLSPISILYIDS

SEQ ID NO: 10454 - protein, 20 aa, Artificial Sequence
  Cyclic GFR-binding peptide
  MOD_RES (6), (7): Xaa is C or S
RVPSTXXAPVKTSPISMLYI

SEQ ID NO: 10455 - protein, 22 aa, Artificial Sequence
  Cyclic GFR-binding peptide
  MOD_RES (6), (7): Xaa is C or S
GSAGPXXTPTKMSPISMLYIND

SEQ ID NO: 10456 - protein, 25 aa, Artificial Sequence
  Cyclic GFR-binding peptide
  MOD_RES (6), (7): Xaa is C or S
STPPTXXVPTRLSPISILYIDSANN

SEQ ID NO: 10457 - protein, 27 aa, Artificial Sequence
  Cyclic GFR-binding peptide
  MOD_RES (6), (7): Xaa is C or S
HVPKPXXAPTKLSPISVLYIDDSSNVI

SEQ ID NO: 10458 - protein, 16 aa, Artificial Sequence
  Cyclic GFR-binding peptide
  MOD_RES (2), (3): Xaa is C or S
PXXTPTKMSPISMLYI

SEQ ID NO: 10459 - protein, 18 aa, Artificial Sequence
  Cyclic GFR-binding peptide
  MOD_RES (4), (5): Xaa is C or S
PPTXXVPTRLSPISILYI

SEQ ID NO: 10460 - protein, 15 aa, Artificial Sequence
  Cyclic GFR-binding peptide
  MOD_RES (1), (2): Xaa is C or S
XXVPTRLSPISILYI

SEQ ID NO: 10461 - protein, 19 aa, Artificial Sequence
  Cyclic GFR-binding peptide
PTKMSPISMLYINDKQQII

SEQ ID NO: 10462 - protein, 24 aa, Artificial Sequence
  Cyclic GFR-binding peptide
  MOD_RES (6), (7): Xaa is C or S
RVPSTXXAPVKTSPISMLYIDNGR

SEQ ID NO: 10463 - protein, 13 aa, Artificial Sequence
  Cyclic GFR-binding peptide
VPTRLSPISILYI

SEQ ID NO: 10464 - protein, 27 aa, Artificial Sequence
  Cyclic GFR-binding peptide
  MOD_RES (6), (7): Xaa is C or S
RVPSTXXAPVKTSPISMLYIDNGRVLL

SEQ ID NO: 10465 - protein, 20 aa, Artificial Sequence
  Cyclic GFR-binding peptide
  MOD_RES (6), (7): Xaa is C or S
STPPTXXVPTRLSPISILYI

SEQ ID NO: 10466 - protein, 13 aa, Artificial Sequence
  Cyclic GFR-binding peptide
APVKTSPISMLYI

SEQ ID NO: 10467 - protein, 17 aa, Artificial Sequence
  Cyclic GFR-binding peptide
RLSPISILYIDSANNVV

SEQ ID NO: 10468 - protein, 21 aa, Artificial Sequence
  Cyclic GFR-binding peptide
  MOD_RES (6), (7): Xaa is C or S
HVPKPXXAPTKLSPISVLYID

SEQ ID NO: 10469 - protein, 19 aa, Artificial Sequence
  Cyclic GFR-binding peptide
PVKTSPISMLYIDNGRVLL

SEQ ID NO: 10470 - protein, 22 aa, Artificial Sequence
  Cyclic GFR-binding peptide
  MOD_RES (6), (7): Xaa is C or S
HVPKPXXAPTKLSPISVLYIDD

SEQ ID NO: 10471 - protein, 17 aa, Artificial Sequence
  Cyclic GFR-binding peptide
KMSPISMLYINDKQQII

SEQ ID NO: 10472 - protein, 16 aa, Artificial Sequence
  Cyclic GFR-binding peptide
MSPISMLYINDKQQII

SEQ ID NO: 10473 - protein, 17 aa, Artificial Sequence
  Cyclic GFR-binding peptide
  MOD_RES (3), (4): Xaa is C or S
PTXXVPTRLSPISILYI

SEQ ID NO: 10474 - protein, 22 aa, Artificial Sequence
  Cyclic GFR-binding peptide
  MOD_RES (6), (7): Xaa is C or S
RVPSTXXAPVKTSPISMLYIDN

SEQ ID NO: 10475 - protein, 19 aa, Artificial Sequence
  Cyclic GFR-binding peptide
  MOD_RES (5), (6): Xaa is C or S
SAGPXXTPTKMSPISMLYI

SEQ ID NO: 10476 - protein, 14 aa, Artificial Sequence
  Cyclic GFR-binding peptide
  MOD_RES (1), (1): Xaa is C or S
XVPTRLSPISILYI

SEQ ID NO: 10477 - protein, 24 aa, Artificial Sequence
  Cyclic GFR-binding peptide
  MOD_RES (6), (7): Xaa is C or S
HVPKPXXAPTKLSPISVLYIDDSS

SEQ ID NO: 10478 - protein, 26 aa, Artificial Sequence
  Cyclic GFR-binding peptide
  MOD_RES (6), (7): Xaa is C or S
GSAGPXXTPTKMSPISMLYINDKQQI

SEQ ID NO: 10479 - protein, 15 aa, Artificial Sequence
  Cyclic GFR-binding peptide
SPISILYIDSANNVV

SEQ ID NO: 10480 - protein, 25 aa, Artificial Sequence
  Cyclic GFR-binding peptide
  MOD_RES (6), (7): Xaa is C or S
HVPKPXXAPTKLSPISVLYIDDSSN

SEQ ID NO: 10481 - protein, 13 aa, Artificial Sequence
  Cyclic GFR-binding peptide
TPTKMSPISMLYI

SEQ ID NO: 10482 - protein, 24 aa, Artificial Sequence
  Cyclic GFR-binding peptide
  MOD_RES (6), (7): Xaa is C or S
STPPTXXVPTRLSPISILYIDSAN

SEQ ID NO: 10483 - protein, 16 aa, Artificial Sequence
  Cyclic GFR-binding peptide
TSPISMLYIDNGRVLL

SEQ ID NO: 10484 - protein, 19 aa, Artificial Sequence
  Cyclic GFR-binding peptide
  MOD_RES (5), (6): Xaa is C or S
VPSTXXAPVKTSPISMLYI

SEQ ID NO: 10485 - protein, 15 aa, Artificial Sequence
  Cyclic GFR-binding peptide
SPISMLYINDKQQII

SEQ ID NO: 10486 - protein, 27 aa, Artificial Sequence
  Cyclic GFR-binding peptide
  MOD_RES (6), (7): Xaa is C or S
GSAGPXXTPTKMSPISMLYINDKQQII

SEQ ID NO: 10487 - protein, 21 aa, Artificial Sequence
  Cyclic GFR-binding peptide
  MOD_RES (6), (7): Xaa is C or S
GSAGPXXTPTKMSPISMLYIN

SEQ ID NO: 10488 - protein, 18 aa, Artificial Sequence
  Cyclic GFR-binding peptide
  MOD_RES (4), (5): Xaa is C or S
PSTXXAPVKTSPISMLYI

SEQ ID NO: 10489 - protein, 15 aa, Artificial Sequence
  Cyclic GFR-binding peptide
  MOD_RES (1), (2): Xaa is C or S
XXTPTKMSPISMLYI

SEQ ID NO: 10490 - protein, 21 aa, Artificial Sequence
  Cyclic GFR-binding peptide
  MOD_RES (6), (7): Xaa is C or S
RVPSTXXAPVKTSPISMLYID

SEQ ID NO: 10491 - protein, 18 aa, Artificial Sequence
  Cyclic GFR-binding peptide
VKTSPISMLYIDNGRVLL

SEQ ID NO: 10492 - protein, 16 aa, Artificial Sequence
  Cyclic GFR-binding peptide
  MOD_RES (2), (3): Xaa is C or S
TXXVPTRLSPISILYI

SEQ ID NO: 10493 - protein, 26 aa, Artificial Sequence
  Cyclic GFR-binding peptide
  MOD_RES (6), (7): Xaa is C or S
RVPSTXXAPVKTSPISMLYIDNGRVL

SEQ ID NO: 10494 - protein, 18 aa, Artificial Sequence
  Cyclic GFR-binding peptide
  MOD_RES (4), (5): Xaa is C or S
AGPXXTPTKMSPISMLYI

SEQ ID NO: 10495 - protein, 15 aa, Artificial Sequence
  Cyclic GFR-binding peptide
SPISMLYIDNGRVLL

SEQ ID NO: 10496 - protein, 26 aa, Artificial Sequence
  Cyclic GFR-binding peptide
  MOD_RES (6), (7): Xaa is C or S
STPPTXXVPTRLSPISILYIDSANNV

SEQ ID NO: 10497 - protein, 16 aa, Artificial Sequence
  Cyclic GFR-binding peptide
  MOD_RES (2), (3): Xaa is C or S
TXXAPVKTSPISMLYI

SEQ ID NO: 10498 - protein, 18 aa, Artificial Sequence
  Cyclic GFR-binding peptide
TRLSPISILYIDSANNVV

SEQ ID NO: 10499 - protein, 23 aa, Artificial Sequence
  Cyclic GFR-binding peptide
  MOD_RES (6), (7): Xaa is C or S
STPPTXXVPTRLSPISILYIDSA

SEQ ID NO: 10500 - protein, 18 aa, Artificial Sequence
  Cyclic GFR-binding peptide
TKMSPISMLYINDKQQII

SEQ ID NO: 10501 - protein, 23 aa, Artificial Sequence
  Cyclic GFR-binding peptide
  MOD_RES (6), (7): Xaa is C or S
RVPSTXXAPVKTSPISMLYIDNG

SEQ ID NO: 10502 - protein, 17 aa, Artificial Sequence
  Cyclic GFR-binding peptide
  MOD_RES (3), (4): Xaa is C or S
STXXAPVKTSPISMLYI

SEQ ID NO: 10503 - protein, 24 aa, Artificial Sequence
  Cyclic GFR-binding peptide
  MOD_RES (6), (7): Xaa is C or S
GSAGPXXTPTKMSPISMLYINDKQ

SEQ ID NO: 10504 - protein, 14 aa, Artificial Sequence
  Cyclic GFR-binding peptide
  MOD_RES (1), (1): Xaa is C or S
XTPTKMSPISMLYI

SEQ ID NO: 10505 - protein, 23 aa, Artificial Sequence
  Cyclic GFR-binding peptide
  MOD_RES (17), (18): Xaa is C or S
SDDFFLVSLSSLKTPAXXPKPVH

SEQ ID NO: 10506 - protein, 18 aa, Artificial Sequence
  Cyclic GFR-binding peptide
IVNSSDDFFLVSLSSLKT

SEQ ID NO: 10507 - protein, 27 aa, Artificial Sequence
  Cyclic GFR-binding peptide
  MOD_RES (21), (21): Xaa is C or S
IVNSSDDFFLVSLSSLKTPAXTPKTVH

SEQ ID NO: 10508 - protein, 15 aa, Artificial Sequence
  Cyclic GFR-binding peptide
  MOD_RES (14), (14): Xaa is C or S
FFLVSLSSLKTPAXT

SEQ ID NO: 10509 - protein, 20 aa, Artificial Sequence
  Cyclic GFR-binding peptide
  MOD_RES (14), (15): Xaa is C or S
FFLVSLSSLKTPAXXPKPVY

SEQ ID NO: 10510 - protein, 25 aa, Artificial Sequence
  Cyclic GFR-binding peptide
  MOD_RES (19), (20): Xaa is C or S
NNSSDFFLVSLSSLKTPAXXAKPVA

SEQ ID NO: 10511 - protein, 23 aa, Artificial Sequence
  Cyclic GFR-binding peptide
  MOD_RES (17), (18): Xaa is C or S
KDNFFLMSLSSMKTPTXXPGASG

SEQ ID NO: 10512 - protein, 24 aa, Artificial Sequence
  Cyclic GFR-binding peptide
  MOD_RES (18), (19): Xaa is C or S
SSDDFFLVSLSSLQTPAXXPKPVT

SEQ ID NO: 10513 - protein, 20 aa, Artificial Sequence
  Cyclic GFR-binding peptide
  MOD_RES (14), (15): Xaa is C or S
FFLISLSSLAQPVXXPAASA

SEQ ID NO: 10514 - protein, 25 aa, Artificial Sequence
  Cyclic GFR-binding peptide
  MOD_RES (19), (20): Xaa is C or S
NNASDFFLISLSSLRTPVXXTPPTS

SEQ ID NO: 10515 - protein, 15 aa, Artificial Sequence
  Cyclic GFR-binding peptide
YTVVGKDFFLISLSS

SEQ ID NO: 10516 - protein, 18 aa, Artificial Sequence
  Cyclic GFR-binding peptide
  MOD_RES (14), (14): Xaa is C or S
FFLMSLSSEETPVXELGE

SEQ ID NO: 10517 - protein, 19 aa, Artificial Sequence
  Cyclic GFR-binding peptide
  MOD_RES (14), (15): Xaa is C or S
FFLVSLSSLKTPAXXAKPV

SEQ ID NO: 10518 - protein, 15 aa, Artificial Sequence
  Cyclic GFR-binding peptide
VVNNASDFFLISLSS

SEQ ID NO: 10519 - protein, 15 aa, Artificial Sequence
  Cyclic GFR-binding peptide
  MOD_RES (14), (15): Xaa is C or S
FFLISLSSLDQSVXX

SEQ ID NO: 10520 - protein, 19 aa, Artificial Sequence
  Cyclic GFR-binding peptide
HQGQHPKIRFFLMSLSSEE

SEQ ID NO: 10521 - protein, 17 aa, Artificial Sequence
  Cyclic GFR-binding peptide
TPVGMDDFFLVSLSSLK

SEQ ID NO: 10522 - protein, 14 aa, Artificial Sequence
  Cyclic GFR-binding peptide
  MOD_RES (14), (14): Xaa is C or S
FFLMSLSSMKTPTX

SEQ ID NO: 10523 - protein, 18 aa, Artificial Sequence
  Cyclic GFR-binding peptide
VVKDYEDFFLMSLSSLET

SEQ ID NO: 10524 - protein, 13 aa, Artificial Sequence
  Cyclic GFR-binding peptide
FFLMSLSSTKVPA

SEQ ID NO: 10525 - protein, 26 aa, Artificial Sequence
  Cyclic GFR-binding peptide
  MOD_RES (20), (21): Xaa is C or S
VNSSDDFFLVSLSSLKTPAXXPKPVY

SEQ ID NO: 10526 - protein, 18 aa, Artificial Sequence
  Cyclic GFR-binding peptide
HQGQHPKIRFFLMSLSSE

SEQ ID NO: 10527 - protein, 18 aa, Artificial Sequence
  Cyclic GFR-binding peptide
  MOD_RES (14), (15): Xaa is C or S
FFLVSLSSLKTPAXXAKP

SEQ ID NO: 10528 - protein, 18 aa, Artificial Sequence
  Cyclic GFR-binding peptide
IVNSSDDFFLVSLSSLQT

SEQ ID NO: 10529 - protein, 22 aa, Artificial Sequence
  Cyclic GFR-binding peptide
  MOD_RES (16), (17): Xaa is C or S
DNFFLMSLSSMKTPTXXPGASG

SEQ ID NO: 10530 - protein, 16 aa, Artificial Sequence
  Cyclic GFR-binding peptide
  MOD_RES (14), (15): Xaa is C or S
FFLMSLSSTKVPAXXT

SEQ ID NO: 10531 - protein, 27 aa, Artificial Sequence
  Cyclic GFR-binding peptide
  MOD_RES (23), (23): Xaa is C or S
PKKRVYEFFLVSLSSHHVRSPQXKVSS

SEQ ID NO: 10532 - protein, 18 aa, Artificial Sequence
  Cyclic GFR-binding peptide
IVNNSSDFFLVSLSSLKT

SEQ ID NO: 10533 - protein, 22 aa, Artificial Sequence
  Cyclic GFR-binding peptide
  MOD_RES (18), (18): Xaa is C or S
YEFFLVSLSSHHVRSPQXKVSS

SEQ ID NO: 10534 - protein, 19 aa, Artificial Sequence
  Cyclic GFR-binding peptide
LKPKKRVYEFFLVSLSSHH

SEQ ID NO: 10535 - protein, 23 aa, Artificial Sequence
  Cyclic GFR-binding peptide
  MOD_RES (17), (18): Xaa is C or S
SDDFFLVSLSSLKTPAXXPKPVY

SEQ ID NO: 10536 - protein, 24 aa, Artificial Sequence
  Cyclic GFR-binding peptide
  MOD_RES (18), (19): Xaa is C or S
GMDDFFLVSLSSLKTPVXXAKGVK

SEQ ID NO: 10537 - protein, 20 aa, Artificial Sequence
  Cyclic GFR-binding peptide
  MOD_RES (14), (15): Xaa is C or S
FFLMSLSSLETPVXXAKPIS

SEQ ID NO: 10538 - protein, 17 aa, Artificial Sequence
  Cyclic GFR-binding peptide
LKPKKRVYEFFLVSLSS

SEQ ID NO: 10539 - protein, 22 aa, Artificial Sequence
  Cyclic GFR-binding peptide
  MOD_RES (16), (17): Xaa is C or S
GIFFLISLSSLDQSVXXPSASA

SEQ ID NO: 10540 - protein, 17 aa, Artificial Sequence
  Cyclic GFR-binding peptide
IIQQKDNFFLMSLSSMK

SEQ ID NO: 10541 - protein, 22 aa, Artificial Sequence
  Cyclic GFR-binding peptide
  MOD_RES (16), (17): Xaa is C or S
GVFFLISLSSLDQPVXXPSASA

SEQ ID NO: 10542 - protein, 19 aa, Artificial Sequence
  Cyclic GFR-binding peptide
LLVRGNDFFLMSLSSTKVP

SEQ ID NO: 10543 - protein, 18 aa, Artificial Sequence
  Cyclic GFR-binding peptide
VKPTRGVFFLISLSSLDQ

SEQ ID NO: 10544 - protein, 25 aa, Artificial Sequence
  Cyclic GFR-binding peptide
  MOD_RES (19), (19): Xaa is C or S
NSSDDFFLVSLSSLKTPAXTPKTVH

SEQ ID NO: 10545 - protein, 17 aa, Artificial Sequence
  Cyclic GFR-binding peptide
  MOD_RES (14), (14): Xaa is C or S
FFLMSLSSEETPVXELG

SEQ ID NO: 10546 - protein, 27 aa, Artificial Sequence
  Cyclic GFR-binding peptide
  MOD_RES (21), (21): Xaa is C or S
GQHPKIRFFLMSLSSEETPVXELGEDN

SEQ ID NO: 10547 - protein, 13 aa, Artificial Sequence
  Cyclic GFR-binding peptide
FFLVSLSSLKTPA

SEQ ID NO: 10548 - protein, 21 aa, Artificial Sequence
  Cyclic GFR-binding peptide
LKPKKRVYEFFLVSLSSHHVR

SEQ ID NO: 10549 - protein, 18 aa, Artificial Sequence
  Cyclic GFR-binding peptide
YTVVGKDFFLISLSSLKT

SEQ ID NO: 10550 - protein, 22 aa, Artificial Sequence
  Cyclic GFR-binding peptide
  MOD_RES (16), (17): Xaa is C or S
SDFFLISLSSLRTPVXXTPPTS

SEQ ID NO: 10551 - protein, 16 aa, Artificial Sequence
  Cyclic GFR-binding peptide
  MOD_RES (14), (15): Xaa is C or S
FFLMSLSSLETPVXXA

SEQ ID NO: 10552 - protein, 17 aa, Artificial Sequence
  Cyclic GFR-binding peptide
IVNSSDDFFLVSLSSLQ

SEQ ID NO: 10553 - protein, 27 aa, Artificial Sequence
  Cyclic GFR-binding peptide
  MOD_RES (21), (22): Xaa is C or S
VVNNAADFFLISLSSLRAPVXXSAPAA

SEQ ID NO: 10554 - protein, 18 aa, Artificial Sequence
  Cyclic GFR-binding peptide
  MOD_RES (14), (15): Xaa is C or S
FFLVSLSSLQTPAXXPKP

SEQ ID NO: 10555 - protein, 23 aa, Artificial Sequence
  Cyclic GFR-binding peptide
  MOD_RES (17), (18): Xaa is C or S
AADFFLISLSSLRAPVXXSAPAA

SEQ ID NO: 10556 - protein, 27 aa, Artificial Sequence
  Cyclic GFR-binding peptide
  MOD_RES (21), (22): Xaa is C or S
LLVRGNDFFLMSLSSTKVPAXXTSPVR

SEQ ID NO: 10557 - protein, 21 aa, Artificial Sequence
  Cyclic GFR-binding peptide
  MOD_RES (15), (16): Xaa is C or S
DFFLISLSSLRTPVXXTPPTS

SEQ ID NO: 10558 - protein, 27 aa, Artificial Sequence
  Cyclic GFR-binding peptide
  MOD_RES (21), (22): Xaa is C or S
IVNSSDDFFLVSLSSLQTPAXXPKPVT

SEQ ID NO: 10559 - protein, 26 aa, Artificial Sequence
  Cyclic GFR-binding peptide
  MOD_RES (20), (21): Xaa is C or S
TVVGKDFFLISLSSLKTPVXXAKSAK

SEQ ID NO: 10560 - protein, 15 aa, Artificial Sequence
  Cyclic GFR-binding peptide
  MOD_RES (14), (15): Xaa is C or S
FFLISLSSLRTPVXX

SEQ ID NO: 10561 - protein, 19 aa, Artificial Sequence
  Cyclic GFR-binding peptide
VKPKRGVFFLISLSSLAQP

SEQ ID NO: 10562 - protein, 20 aa, Artificial Sequence
  Cyclic GFR-binding peptide
LKPKKRVYEFFLVSLSSHHV

SEQ ID NO: 10563 - protein, 16 aa, Artificial Sequence
  Cyclic GFR-binding peptide
  MOD_RES (14), (15): Xaa is C or S
FFLISLSSLRAPVXXS

SEQ ID NO: 10564 - protein, 14 aa, Artificial Sequence
  Cyclic GFR-binding peptide
  MOD_RES (14), (14): Xaa is C or S
FFLISLSSLDQPVX

SEQ ID NO: 10565 - protein, 17 aa, Artificial Sequence
  Cyclic GFR-binding peptide
IVNSSDDFFLVSLSSLK

SEQ ID NO: 10566 - protein, 19 aa, Artificial Sequence
  Cyclic GFR-binding peptide
  MOD_RES (14), (15): Xaa is C or S
FFLVSLSSLQTPAXXPKPV

SEQ ID NO: 10567 - protein, 14 aa, Artificial Sequence
  Cyclic GFR-binding peptide
  MOD_RES (14), (14): Xaa is C or S
FFLMSLSSLETPVX

SEQ ID NO: 10568 - protein, 14 aa, Artificial Sequence
  Cyclic GFR-binding peptide
  MOD_RES (14), (14): Xaa is C or S
FFLVSLSSLQTPAX

SEQ ID NO: 10569 - protein, 14 aa, Artificial Sequence
  Cyclic GFR-binding peptide
  MOD_RES (14), (14): Xaa is C or S
FFLISLSSLAQPVX

SEQ ID NO: 10570 - protein, 16 aa, Artificial Sequence
  Cyclic GFR-binding peptide
  MOD_RES (14), (14): Xaa is C or S
FFLMSLSSEETPVXEL

SEQ ID NO: 10571 - protein, 15 aa, Artificial Sequence
  Cyclic GFR-binding peptide
  MOD_RES (14), (15): Xaa is C or S
FFLMSLSSTKVPAXX

SEQ ID NO: 10572 - protein, 14 aa, Artificial Sequence
  Cyclic GFR-binding peptide
FFLVSLSSHHVRSP

SEQ ID NO: 10573 - protein, 19 aa, Artificial Sequence
  Cyclic GFR-binding peptide
  MOD_RES (14), (15): Xaa is C or S
FFLISLSSLDQPVXXPSAS

SEQ ID NO: 10574 - protein, 16 aa, Artificial Sequence
  Cyclic GFR-binding peptide
  MOD_RES (14), (15): Xaa is C or S
FFLISLSSLDQSVXXP

SEQ ID NO: 10575 - protein, 24 aa, Artificial Sequence
  Cyclic GFR-binding peptide
  MOD_RES (18), (19): Xaa is C or S
SSDDFFLVSLSSLKTPAXXPKPVY

SEQ ID NO: 10576 - protein, 24 aa, Artificial Sequence
  Cyclic GFR-binding peptide
  MOD_RES (18), (19): Xaa is C or S
RGNDFFLMSLSSTKVPAXXTSPVR

SEQ ID NO: 10577 - protein, 15 aa, Artificial Sequence
  Cyclic GFR-binding peptide
FFLVSLSSHHVRSPQ

SEQ ID NO: 10578 - protein, 15 aa, Artificial Sequence
  Cyclic GFR-binding peptide
VKPTRGVFFLISLSS

SEQ ID NO: 10579 - protein, 25 aa, Artificial Sequence
  Cyclic GFR-binding peptide
  MOD_RES (19), (20): Xaa is C or S
PTKGIFFLISLSSLDQSVXXPSASA

SEQ ID NO: 10580 - protein, 14 aa, Artificial Sequence
  Cyclic GFR-binding peptide
  MOD_RES (14), (14): Xaa is C or S
FFLISLSSLKTPVX

SEQ ID NO: 10581 - protein, 17 aa, Artificial Sequence
  Cyclic GFR-binding peptide
VVKDYEDFFLMSLSSLE

SEQ ID NO: 10582 - protein, 21 aa, Artificial Sequence
  Cyclic GFR-binding peptide
  MOD_RES (15), (16): Xaa is C or S
DFFLVSLSSLKTPAXXPKPVY

SEQ ID NO: 10583 - protein, 13 aa, Artificial Sequence
  Cyclic GFR-binding peptide
FFLVSLSSLKTPV

SEQ ID NO: 10584 - protein, 24 aa, Artificial Sequence
  Cyclic GFR-binding peptide
  MOD_RES (18), (19): Xaa is C or S
VGKDFFLISLSSLKTPVXXAKSAK

SEQ ID NO: 10585 - protein, 24 aa, Artificial Sequence
  Cyclic GFR-binding peptide
  MOD_RES (18), (19): Xaa is C or S
NSSDFFLVSLSSLKTPAXXAKPVA

SEQ ID NO: 10586 - protein, 25 aa, Artificial Sequence
  Cyclic GFR-binding peptide
  MOD_RES (19), (20): Xaa is C or S
VVGKDFFLISLSSLKTPVXXAKSAK

SEQ ID NO: 10587 - protein, 20 aa, Artificial Sequence
  Cyclic GFR-binding peptide
HQGQHPKIRFFLMSLSSEET

SEQ ID NO: 10588 - protein, 19 aa, Artificial Sequence
  Cyclic GFR-binding peptide
VVNNASDFFLISLSSLRTP

SEQ ID NO: 10589 - protein, 18 aa, Artificial Sequence
  Cyclic GFR-binding peptide
  MOD_RES (14), (15): Xaa is C or S
FFLISLSSLAQPVXXPAA

SEQ ID NO: 10590 - protein, 28 aa, Artificial Sequence
  Cyclic GFR-binding peptide
  MOD_RES (22), (22): Xaa is C or S
QGQHPKIRFFLMSLSSEETPVXELGEDN

SEQ ID NO: 10591 - protein, 19 aa, Artificial Sequence
  Cyclic GFR-binding peptide
VVKENEDFFLMSLSSLETP

SEQ ID NO: 10592 - protein, 19 aa, Artificial Sequence
  Cyclic GFR-binding peptide
VVNNAADFFLISLSSLRAP

SEQ ID NO: 10593 - protein, 22 aa, Artificial Sequence
  Cyclic GFR-binding peptide
  MOD_RES (16), (17): Xaa is C or S
ADFFLISLSSLRAPVXXSAPAA

SEQ ID NO: 10594 - protein, 25 aa, Artificial Sequence
  Cyclic GFR-binding peptide
  MOD_RES (19), (20): Xaa is C or S
NNAADFFLISLSSLRAPVXXSAPAA

SEQ ID NO: 10595 - protein, 18 aa, Artificial Sequence
  Cyclic GFR-binding peptide
  MOD_RES (14), (15): Xaa is C or S
FFLMSLSSTKVPAXXTSP

SEQ ID NO: 10596 - protein, 24 aa, Artificial Sequence
  Cyclic GFR-binding peptide
  MOD_RES (18), (18): Xaa is C or S
SSDDFFLVSLSSLKTPAXTPKTVH

SEQ ID NO: 10597 - protein, 26 aa, Artificial Sequence
  Cyclic GFR-binding peptide
  MOD_RES (20), (20): Xaa is C or S
VNSSDDFFLVSLSSLKTPAXTPKTVH

SEQ ID NO: 10598 - protein, 24 aa, Artificial Sequence
  Cyclic GFR-binding peptide
  MOD_RES (18), (19): Xaa is C or S
TRGVFFLISLSSLDQPVXXPSASA

SEQ ID NO: 10599 - protein, 16 aa, Artificial Sequence
  Cyclic GFR-binding peptide
  MOD_RES (14), (15): Xaa is C or S
FFLVSLSSLKTPVXXA

SEQ ID NO: 10600 - protein, 16 aa, Artificial Sequence
  Cyclic GFR-binding peptide
VKPKRGVFFLISLSSL

SEQ ID NO: 10601 - protein, 22 aa, Artificial Sequence
  Cyclic GFR-binding peptide
  MOD_RES (16), (17): Xaa is C or S
DDFFLVSLSSLKTPVXXAKGVK

SEQ ID NO: 10602 - protein, 16 aa, Artificial Sequence
  Cyclic GFR-binding peptide
  MOD_RES (14), (15): Xaa is C or S
FFLVSLSSLKTPAXXP

SEQ ID NO: 10603 - protein, 16 aa, Artificial Sequence
  Cyclic GFR-binding peptide
  MOD_RES (14), (15): Xaa is C or S
FFLVSLSSLQTPAXXP

SEQ ID NO: 10604 - protein, 20 aa, Artificial Sequence
  Cyclic GFR-binding peptide
  MOD_RES (14), (15): Xaa is C or S
FFLVSLSSLKTPVXXAKGVK

SEQ ID NO: 10605 - protein, 18 aa, Artificial Sequence
  Cyclic GFR-binding peptide
  MOD_RES (14), (15): Xaa is C or S
FFLISLSSLDQSVXXPSA

SEQ ID NO: 10606 - protein, 16 aa, Artificial Sequence
  Cyclic GFR-binding peptide
  MOD_RES (16), (16): Xaa is C or S
FFLVSLSSHHVRSPQX

SEQ ID NO: 10607 - protein, 23 aa, Artificial Sequence
  Cyclic GFR-binding peptide
  MOD_RES (17), (18): Xaa is C or S
SSDFFLVSLSSLKTPAXXAKPVA

SEQ ID NO: 10608 - protein, 14 aa, Artificial Sequence
  Cyclic GFR-binding peptide
  MOD_RES (14), (14): Xaa is C or S
FFLVSLSSLKTPVX

SEQ ID NO: 10609 - protein, 15 aa, Artificial Sequence
  Cyclic GFR-binding peptide
TPVGMDDFFLVSLSS

SEQ ID NO: 10610 - protein, 19 aa, Artificial Sequence
  Cyclic GFR-binding peptide
IIQQKDNFFLMSLSSMKTP

SEQ ID NO: 10611 - protein, 25 aa, Artificial Sequence
  Cyclic GFR-binding peptide
  MOD_RES (19), (20): Xaa is C or S
NSSDDFFLVSLSSLKTPAXXPKPVY

SEQ ID NO: 10612 - protein, 23 aa, Artificial Sequence
  Cyclic GFR-binding peptide
  MOD_RES (17), (18): Xaa is C or S
GNDFFLMSLSSTKVPAXXTSPVR

SEQ ID NO: 10613 - protein, 17 aa, Artificial Sequence
  Cyclic GFR-binding peptide
  MOD_RES (14), (15): Xaa is C or S
FFLISLSSLDQSVXXPS

SEQ ID NO: 10614 - protein, 15 aa, Artificial Sequence
  Cyclic GFR-binding peptide
  MOD_RES (14), (15): Xaa is C or S
FFLISLSSLAQPVXX

SEQ ID NO: 10615 - protein, 16 aa, Artificial Sequence
  Cyclic GFR-binding peptide
IKPTKGIFFLISLSSL

SEQ ID NO: 10616 - protein, 27 aa, Artificial Sequence
  Cyclic GFR-binding peptide
  MOD_RES (21), (22): Xaa is C or S
TPVGMDDFFLVSLSSLKTPVXXAKGVK

SEQ ID NO: 10617 - protein, 27 aa, Artificial Sequence
  Cyclic GFR-binding peptide
  MOD_RES (21), (22): Xaa is C or S
VKPTRGVFFLISLSSLDQPVXXPSASA

SEQ ID NO: 10618 - protein, 15 aa, Artificial Sequence
  Cyclic GFR-binding peptide
IKPTKGIFFLISLSS

SEQ ID NO: 10619 - protein, 18 aa, Artificial Sequence
  Cyclic GFR-binding peptide
  MOD_RES (16), (16): Xaa is C or S
FFLVSLSSHHVRSPQXKV

SEQ ID NO: 10620 - protein, 22 aa, Artificial Sequence
  Cyclic GFR-binding peptide
  MOD_RES (16), (17): Xaa is C or S
EDFFLMSLSSLETPVXXAKPIK

SEQ ID NO: 10621 - protein, 16 aa, Artificial Sequence
  Cyclic GFR-binding peptide
IIQQKDNFFLMSLSSM

SEQ ID NO: 10622 - protein, 23 aa, Artificial Sequence
  Cyclic GFR-binding peptide
  MOD_RES (17), (17): Xaa is C or S
KIRFFLMSLSSEETPVXELGEDN

SEQ ID NO: 10623 - protein, 19 aa, Artificial Sequence
  Cyclic GFR-binding peptide
  MOD_RES (14), (15): Xaa is C or S
FFLISLSSLAQPVXXPAAS

SEQ ID NO: 10624 - protein, 27 aa, Artificial Sequence
  Cyclic GFR-binding peptide
  MOD_RES (21), (22): Xaa is C or S
IVNSSDDFFLVSLSSLKTPAXXPKPVH

SEQ ID NO: 10625 - protein, 23 aa, Artificial Sequence
  Cyclic GFR-binding peptide
  MOD_RES (17), (18): Xaa is C or S
KGIFFLISLSSLDQSVXXPSASA

SEQ ID NO: 10626 - protein, 22 aa, Artificial Sequence
  Cyclic GFR-binding peptide
  MOD_RES (16), (17): Xaa is C or S
DDFFLVSLSSLKTPAXXPKPVY

SEQ ID NO: 10627 - protein, 17 aa, Artificial Sequence
  Cyclic GFR-binding peptide
  MOD_RES (14), (15): Xaa is C or S
FFLISLSSLRTPVXXTP

SEQ ID NO: 10628 - protein, 26 aa, Artificial Sequence
  Cyclic GFR-binding peptide
  MOD_RES (20), (21): Xaa is C or S
LVRGNDFFLMSLSSTKVPAXXTSPVR

SEQ ID NO: 10629 - protein, 17 aa, Artificial Sequence
  Cyclic GFR-binding peptide
  MOD_RES (14), (15): Xaa is C or S
FFLMSLSSTKVPAXXTS

SEQ ID NO: 10630 - protein, 29 aa, Artificial Sequence
  Cyclic GFR-binding peptide
  MOD_RES (23), (23): Xaa is C or S
HQGQHPKIRFFLMSLSSEETPVXELGEDN

SEQ ID NO: 10631 - protein, 27 aa, Artificial Sequence
  Cyclic GFR-binding peptide
  MOD_RES (21), (22): Xaa is C or S
IVNNSSDFFLVSLSSLKTPAXXAKPVA

SEQ ID NO: 10632 - protein, 26 aa, Artificial Sequence
  Cyclic GFR-binding peptide
  MOD_RES (22), (22): Xaa is C or S
KKRVYEFFLVSLSSHHVRSPQXKVSS

SEQ ID NO: 10633 - protein, 26 aa, Artificial Sequence
  Cyclic GFR-binding peptide
  MOD_RES (20), (21): Xaa is C or S
VNNASDFFLISLSSLRTPVXXTPPTS

SEQ ID NO: 10634 - protein, 21 aa, Artificial Sequence
  Cyclic GFR-binding peptide
  MOD_RES (15), (16): Xaa is C or S
DFFLVSLSSLKTPAXXPKPVH

SEQ ID NO: 10635 - protein, 15 aa, Artificial Sequence
  Cyclic GFR-binding peptide
VVNNAADFFLISLSS

SEQ ID NO: 10636 - protein, 15 aa, Artificial Sequence
  Cyclic GFR-binding peptide
  MOD_RES (14), (15): Xaa is C or S
FFLVSLSSLKTPAXX

SEQ ID NO: 10637 - protein, 17 aa, Artificial Sequence
  Cyclic GFR-binding peptide
VKPTRGVFFLISLSSLD

SEQ ID NO: 10638 - protein, 14 aa, Artificial Sequence
  Cyclic GFR-binding peptide
  MOD_RES (14), (14): Xaa is C or S
FFLISLSSLDQSVX

SEQ ID NO: 10639 - protein, 19 aa, Artificial Sequence
  Cyclic GFR-binding peptide
  MOD_RES (14), (15): Xaa is C or S
FFLISLSSLRAPVXXSAPA

SEQ ID NO: 10640 - protein, 18 aa, Artificial Sequence
  Cyclic GFR-binding peptide
IIQQKDNFFLMSLSSMKT

SEQ ID NO: 10641 - protein, 13 aa, Artificial Sequence
  Cyclic GFR-binding peptide
FFLMSLSSLETPV

SEQ ID NO: 10642 - protein, 22 aa, Artificial Sequence
  Cyclic GFR-binding peptide
  MOD_RES (16), (16): Xaa is C or S
IRFFLMSLSSEETPVXELGEDN

SEQ ID NO: 10643 - protein, 27 aa, Artificial Sequence
  Cyclic GFR-binding peptide
  MOD_RES (21), (22): Xaa is C or S
VVKENEDFFLMSLSSLETPVXXAKPIK

SEQ ID NO: 10644 - protein, 25 aa, Artificial Sequence
  Cyclic GFR-binding peptide
  MOD_RES (19), (20): Xaa is C or S
NSSDDFFLVSLSSLQTPAXXPKPVT

SEQ ID NO: 10645 - protein, 15 aa, Artificial Sequence
  Cyclic GFR-binding peptide
LLVRGNDFFLMSLSS

SEQ ID NO: 10646 - protein, 24 aa, Artificial Sequence
  Cyclic GFR-binding peptide
  MOD_RES (18), (19): Xaa is C or S
DYEDFFLMSLSSLETPVXXAKPIS

SEQ ID NO: 10647 - protein, 18 aa, Artificial Sequence
  Cyclic GFR-binding peptide
  MOD_RES (14), (15): Xaa is C or S
FFLVSLSSLKTPAXXPKP

SEQ ID NO: 10648 - protein, 21 aa, Artificial Sequence
  Cyclic GFR-binding peptide
  MOD_RES (15), (16): Xaa is C or S
DFFLISLSSLRAPVXXSAPAA

SEQ ID NO: 10649 - protein, 21 aa, Artificial Sequence
  Cyclic GFR-binding peptide
  MOD_RES (15), (16): Xaa is C or S
IFFLISLSSLDQSVXXPSASA

SEQ ID NO: 10650 - protein, 23 aa, Artificial Sequence
  Cyclic GFR-binding peptide
  MOD_RES (17), (18): Xaa is C or S
SDDFFLVSLSSLQTPAXXPKPVT

SEQ ID NO: 10651 - protein, 22 aa, Artificial Sequence
  Cyclic GFR-binding peptide
  MOD_RES (16), (16): Xaa is C or S
DDFFLVSLSSLKTPAXTPKTVH

SEQ ID NO: 10652 - protein, 14 aa, Artificial Sequence
  Cyclic GFR-binding peptide
  MOD_RES (14), (14): Xaa is C or S
FFLISLSSLRAPVX

SEQ ID NO: 10653 - protein, 21 aa, Artificial Sequence
  Cyclic GFR-binding peptide
  MOD_RES (15), (16): Xaa is C or S
DFFLISLSSLKTPVXXAKSAK

SEQ ID NO: 10654 - protein, 23 aa, Artificial Sequence
  Cyclic GFR-binding peptide
  MOD_RES (17), (18): Xaa is C or S
ASDFFLISLSSLRTPVXXTPPTS

SEQ ID NO: 10655 - protein, 26 aa, Artificial Sequence
  Cyclic GFR-binding peptide
  MOD_RES (20), (21): Xaa is C or S
VNNAADFFLISLSSLRAPVXXSAPAA

SEQ ID NO: 10656 - protein, 19 aa, Artificial Sequence
  Cyclic GFR-binding peptide
  MOD_RES (16), (16): Xaa is C or S
FFLVSLSSHHVRSPQXKVS

SEQ ID NO: 10657 - protein, 19 aa, Artificial Sequence
  Cyclic GFR-binding peptide
  MOD_RES (14), (15): Xaa is C or S
FFLMSLSSMKTPTXXPGAS

SEQ ID NO: 10658 - protein, 17 aa, Artificial Sequence
  Cyclic GFR-binding peptide
VVNNASDFFLISLSSLR

SEQ ID NO: 10659 - protein, 20 aa, Artificial Sequence
  Cyclic GFR-binding peptide
  MOD_RES (14), (15): Xaa is C or S
FFLISLSSLDQPVXXPSASA

SEQ ID NO: 10660 - protein, 17 aa, Artificial Sequence
  Cyclic GFR-binding peptide
  MOD_RES (14), (15): Xaa is C or S
FFLVSLSSLKTPAXXPK

SEQ ID NO: 10661 - protein, 17 aa, Artificial Sequence
  Cyclic GFR-binding peptide
  MOD_RES (14), (15): Xaa is C or S
FFLISLSSLKTPVXXAK

SEQ ID NO: 10662 - protein, 13 aa, Artificial Sequence
  Cyclic GFR-binding peptide
FFLISLSSLDQPV

SEQ ID NO: 10663 - protein, 20 aa, Artificial Sequence
  Cyclic GFR-binding peptide
  MOD_RES (14), (15): Xaa is C or S
FFLISLSSLRAPVXXSAPAA

SEQ ID NO: 10664 - protein, 15 aa, Artificial Sequence
  Cyclic GFR-binding peptide
VVKDYEDFFLMSLSS

SEQ ID NO: 10665 - protein, 21 aa, Artificial Sequence
  Cyclic GFR-binding peptide
  MOD_RES (15), (16): Xaa is C or S
VFFLISLSSLAQPVXXPAASA

SEQ ID NO: 10666 - protein, 20 aa, Artificial Sequence
  Cyclic GFR-binding peptide
  MOD_RES (14), (14): Xaa is C or S
FFLVSLSSLKTPAXTPKTVH

SEQ ID NO: 10667 - protein, 24 aa, Artificial Sequence
  Cyclic GFR-binding peptide
  MOD_RES (18), (19): Xaa is C or S
NASDFFLISLSSLRTPVXXTPPTS

SEQ ID NO: 10668 - protein, 24 aa, Artificial Sequence
  Cyclic GFR-binding peptide
  MOD_RES (18), (19): Xaa is C or S
KRGVFFLISLSSLAQPVXXPAASA

SEQ ID NO: 10669 - protein, 17 aa, Artificial Sequence
  Cyclic GFR-binding peptide
VVNNAADFFLISLSSLR

SEQ ID NO: 10670 - protein, 15 aa, Artificial Sequence
  Cyclic GFR-binding peptide
VKPKRGVFFLISLSS

SEQ ID NO: 10671 - protein, 15 aa, Artificial Sequence
  Cyclic GFR-binding peptide
IVNSSDDFFLVSLSS

SEQ ID NO: 10672 - protein, 29 aa, Artificial Sequence
  Cyclic GFR-binding peptide
  MOD_RES (25), (25): Xaa is C or S
LKPKKRVYEFFLVSLSSHHVRSPQXKVSS

SEQ ID NO: 10673 - protein, 18 aa, Artificial Sequence
  Cyclic GFR-binding peptide
LLVRGNDFFLMSLSSTKV

SEQ ID NO: 10674 - protein, 20 aa, Artificial Sequence
  Cyclic GFR-binding peptide
  MOD_RES (16), (16): Xaa is C or S
FFLVSLSSHHVRSPQXKVSS

SEQ ID NO: 10675 - protein, 15 aa, Artificial Sequence
  Cyclic GFR-binding peptide
  MOD_RES (14), (15): Xaa is C or S
FFLISLSSLDQPVXX

SEQ ID NO: 10676 - protein, 23 aa, Artificial Sequence
  Cyclic GFR-binding peptide
  MOD_RES (17), (18): Xaa is C or S
RGVFFLISLSSLDQPVXXPSASA

SEQ ID NO: 10677 - protein, 27 aa, Artificial Sequence
  Cyclic GFR-binding peptide
  MOD_RES (21), (22): Xaa is C or S
IKPTKGIFFLISLSSLDQSVXXPSASA

SEQ ID NO: 10678 - protein, 25 aa, Artificial Sequence
  Cyclic GFR-binding peptide
  MOD_RES (19), (20): Xaa is C or S
KDYEDFFLMSLSSLETPVXXAKPIS

SEQ ID NO: 10679 - protein, 16 aa, Artificial Sequence
  Cyclic GFR-binding peptide
IVNNSSDFFLVSLSSL

SEQ ID NO: 10680 - protein, 26 aa, Artificial Sequence
  Cyclic GFR-binding peptide
  MOD_RES (20), (21): Xaa is C or S
VNSSDDFFLVSLSSLQTPAXXPKPVT

SEQ ID NO: 10681 - protein, 26 aa, Artificial Sequence
  Cyclic GFR-binding peptide
  MOD_RES (20), (21): Xaa is C or S
KPTRGVFFLISLSSLDQPVXXPSASA

SEQ ID NO: 10682 - protein, 17 aa, Artificial Sequence
  Cyclic GFR-binding peptide
VKPKRGVFFLISLSSLA

SEQ ID NO: 10683 - protein, 19 aa, Artificial Sequence
  Cyclic GFR-binding peptide
IVNSSDDFFLVSLSSLKTP

SEQ ID NO: 10684 - protein, 18 aa, Artificial Sequence
  Cyclic GFR-binding peptide
VVNNASDFFLISLSSLRT

SEQ ID NO: 10685 - protein, 16 aa, Artificial Sequence
  Cyclic GFR-binding peptide
YTVVGKDFFLISLSSL

SEQ ID NO: 10686 - protein, 21 aa, Artificial Sequence
  Cyclic GFR-binding peptide
  MOD_RES (15), (16): Xaa is C or S
DFFLVSLSSLKTPAXXAKPVA

SEQ ID NO: 10687 - protein, 20 aa, Artificial Sequence
  Cyclic GFR-binding peptide
  MOD_RES (14), (15): Xaa is C or S
FFLISLSSLRTPVXXTPPTS

SEQ ID NO: 10688 - protein, 18 aa, Artificial Sequence
  Cyclic GFR-binding peptide
VVNNAADFFLISLSSLRA

SEQ ID NO: 10689 - protein, 25 aa, Artificial Sequence
  Cyclic GFR-binding peptide
  MOD_RES (19), (20): Xaa is C or S
QQKDNFFLMSLSSMKTPTXXPGASG

SEQ ID NO: 10690 - protein, 19 aa, Artificial Sequence
  Cyclic GFR-binding peptide
  MOD_RES (14), (15): Xaa is C or S
FFLVSLSSLKTPVXXAKGV

SEQ ID NO: 10691 - protein, 23 aa, Artificial Sequence
  Cyclic GFR-binding peptide
  MOD_RES (17), (18): Xaa is C or S
NEDFFLMSLSSLETPVXXAKPIK

SEQ ID NO: 10692 - protein, 18 aa, Artificial Sequence
  Cyclic GFR-binding peptide
  MOD_RES (14), (14): Xaa is C or S
FFLVSLSSLKTPAXTPKT

SEQ ID NO: 10693 - protein, 25 aa, Artificial Sequence
  Cyclic GFR-binding peptide
  MOD_RES (19), (20): Xaa is C or S
PKRGVFFLISLSSLAQPVXXPAASA

SEQ ID NO: 10694 - protein, 20 aa, Artificial Sequence
  Cyclic GFR-binding peptide
  MOD_RES (14), (14): Xaa is C or S
FFLMSLSSEETPVXELGEDN

SEQ ID NO: 10695 - protein, 19 aa, Artificial Sequence
  Cyclic GFR-binding peptide
VKPTRGVFFLISLSSLDQP

SEQ ID NO: 10696 - protein, 19 aa, Artificial Sequence
  Cyclic GFR-binding peptide
VVKDYEDFFLMSLSSLETP

SEQ ID NO: 10697 - protein, 17 aa, Artificial Sequence
  Cyclic GFR-binding peptide
  MOD_RES (16), (16): Xaa is C or S
FFLVSLSSHHVRSPQXK

SEQ ID NO: 10698 - protein, 26 aa, Artificial Sequence
  Cyclic GFR-binding peptide
  MOD_RES (20), (21): Xaa is C or S
IQQKDNFFLMSLSSMKTPTXXPGASG

SEQ ID NO: 10699 - protein, 13 aa, Artificial Sequence
  Cyclic GFR-binding peptide
FFLISLSSLAQPV

SEQ ID NO: 10700 - protein, 22 aa, Artificial Sequence
  Cyclic GFR-binding peptide
  MOD_RES (16), (17): Xaa is C or S
DDFFLVSLSSLQTPAXXPKPVT

SEQ ID NO: 10701 - protein, 19 aa, Artificial Sequence
  Cyclic GFR-binding peptide
YTVVGKDFFLISLSSLKTP

SEQ ID NO: 10702 - protein, 25 aa, Artificial Sequence
  Cyclic GFR-binding peptide
  MOD_RES (19), (20): Xaa is C or S
VRGNDFFLMSLSSTKVPAXXTSPVR

SEQ ID NO: 10703 - protein, 19 aa, Artificial Sequence
  Cyclic GFR-binding peptide
IVNSSDDFFLVSLSSLQTP

SEQ ID NO: 10704 - protein, 16 aa, Artificial Sequence
  Cyclic GFR-binding peptide
  MOD_RES (14), (15): Xaa is C or S
FFLISLSSLDQPVXXP

SEQ ID NO: 10705 - protein, 16 aa, Artificial Sequence
  Cyclic GFR-binding peptide
LLVRGNDFFLMSLSST

SEQ ID NO: 10706 - protein, 15 aa, Artificial Sequence
  Cyclic GFR-binding peptide
VVKENEDFFLMSLSS

SEQ ID NO: 10707 - protein, 17 aa, Artificial Sequence
  Cyclic GFR-binding peptide
HQGQHPKIRFFLMSLSS

SEQ ID NO: 10708 - protein, 15 aa, Artificial Sequence
  Cyclic GFR-binding peptide
  MOD_RES (14), (15): Xaa is C or S
FFLISLSSLRAPVXX

SEQ ID NO: 10709 - protein, 22 aa, Artificial Sequence
  Cyclic GFR-binding peptide
  MOD_RES (16), (17): Xaa is C or S
GVFFLISLSSLAQPVXXPAASA

SEQ ID NO: 10710 - protein, 18 aa, Artificial Sequence
  Cyclic GFR-binding peptide
  MOD_RES (14), (15): Xaa is C or S
FFLMSLSSMKTPTXXPGA

SEQ ID NO: 10711 - protein, 19 aa, Artificial Sequence
  Cyclic GFR-binding peptide
IVNNSSDFFLVSLSSLKTP

SEQ ID NO: 10712 - protein, 13 aa, Artificial Sequence
  Cyclic GFR-binding peptide
FFLISLSSLKTPV

SEQ ID NO: 10713 - protein, 26 aa, Artificial Sequence
  Cyclic GFR-binding peptide
  MOD_RES (20), (20): Xaa is C or S
QHPKIRFFLMSLSSEETPVXELGEDN

SEQ ID NO: 10714 - protein, 21 aa, Artificial Sequence
  Cyclic GFR-binding peptide
  MOD_RES (15), (16): Xaa is C or S
DFFLMSLSSLETPVXXAKPIK

SEQ ID NO: 10715 - protein, 15 aa, Artificial Sequence
  Cyclic GFR-binding peptide
  MOD_RES (14), (15): Xaa is C or S
FFLMSLSSLETPVXX

SEQ ID NO: 10716 - protein, 25 aa, Artificial Sequence
  Cyclic GFR-binding peptide
  MOD_RES (19), (20): Xaa is C or S
NSSDDFFLVSLSSLKTPAXXPKPVH

SEQ ID NO: 10717 - protein, 18 aa, Artificial Sequence
  Cyclic GFR-binding peptide
IKPTKGIFFLISLSSLDQ

SEQ ID NO: 10718 - protein, 16 aa, Artificial Sequence
  Cyclic GFR-binding peptide
  MOD_RES (14), (15): Xaa is C or S
FFLMSLSSMKTPTXXP

SEQ ID NO: 10719 - protein, 16 aa, Artificial Sequence
  Cyclic GFR-binding peptide
VVKDYEDFFLMSLSSL

SEQ ID NO: 10720 - protein, 13 aa, Artificial Sequence
  Cyclic GFR-binding peptide
FFLVSLSSLQTPA

SEQ ID NO: 10721 - protein, 18 aa, Artificial Sequence
  Cyclic GFR-binding peptide
  MOD_RES (14), (15): Xaa is C or S
FFLISLSSLRTPVXXTPP

SEQ ID NO: 10722 - protein, 26 aa, Artificial Sequence
  Cyclic GFR-binding peptide
  MOD_RES (20), (21): Xaa is C or S
PVGMDDFFLVSLSSLKTPVXXAKGVK

SEQ ID NO: 10723 - protein, 16 aa, Artificial Sequence
  Cyclic GFR-binding peptide
  MOD_RES (14), (14): Xaa is C or S
FFLVSLSSLKTPAXTP

SEQ ID NO: 10724 - protein, 19 aa, Artificial Sequence
  Cyclic GFR-binding peptide
TPVGMDDFFLVSLSSLKTP

SEQ ID NO: 10725 - protein, 15 aa, Artificial Sequence
  Cyclic GFR-binding peptide
  MOD_RES (14), (15): Xaa is C or S
FFLVSLSSLKTPVXX

SEQ ID NO: 10726 - protein, 20 aa, Artificial Sequence
  Cyclic GFR-binding peptide
  MOD_RES (14), (15): Xaa is C or S
FFLMSLSSMKTPTXXPGASG

SEQ ID NO: 10727 - protein, 26 aa, Artificial Sequence
  Cyclic GFR-binding peptide
  MOD_RES (20), (21): Xaa is C or S
KPTKGIFFLISLSSLDQSVXXPSASA

SEQ ID NO: 10728 - protein, 22 aa, Artificial Sequence
  Cyclic GFR-binding peptide
  MOD_RES (16), (17): Xaa is C or S
KDFFLISLSSLKTPVXXAKSAK

SEQ ID NO: 10729 - protein, 13 aa, Artificial Sequence
  Cyclic GFR-binding peptide
FFLVSLSSHHVRS

SEQ ID NO: 10730 - protein, 18 aa, Artificial Sequence
  Cyclic GFR-binding peptide
  MOD_RES (14), (15): Xaa is C or S
FFLISLSSLKTPVXXAKS

SEQ ID NO: 10731 - protein, 25 aa, Artificial Sequence
  Cyclic GFR-binding peptide
  MOD_RES (21), (21): Xaa is C or S
KRVYEFFLVSLSSHHVRSPQXKVSS

SEQ ID NO: 10732 - protein, 16 aa, Artificial Sequence
  Cyclic GFR-binding peptide
  MOD_RES (14), (15): Xaa is C or S
FFLISLSSLKTPVXXA

SEQ ID NO: 10733 - protein, 17 aa, Artificial Sequence
  Cyclic GFR-binding peptide
  MOD_RES (14), (15): Xaa is C or S
FFLVSLSSLQTPAXXPK

SEQ ID NO: 10734 - protein, 17 aa, Artificial Sequence
  Cyclic GFR-binding peptide
  MOD_RES (14), (15): Xaa is C or S
FFLVSLSSLKTPAXXAK

SEQ ID NO: 10735 - protein, 26 aa, Artificial Sequence
  Cyclic GFR-binding peptide
  MOD_RES (20), (21): Xaa is C or S
VNNSSDFFLVSLSSLKTPAXXAKPVA

SEQ ID NO: 10736 - protein, 23 aa, Artificial Sequence
  Cyclic GFR-binding peptide
  MOD_RES (17), (17): Xaa is C or S
SDDFFLVSLSSLKTPAXTPKTVH

SEQ ID NO: 10737 - protein, 13 aa, Artificial Sequence
  Cyclic GFR-binding peptide
FFLISLSSLRTPV

SEQ ID NO: 10738 - protein, 15 aa, Artificial Sequence
  Cyclic GFR-binding peptide
  MOD_RES (14), (15): Xaa is C or S
FFLMSLSSMKTPTXX

SEQ ID NO: 10739 - protein, 27 aa, Artificial Sequence
  Cyclic GFR-binding peptide
  MOD_RES (21), (22): Xaa is C or S
VVKDYEDFFLMSLSSLETPVXXAKPIS

SEQ ID NO: 10740 - protein, 20 aa, Artificial Sequence
  Cyclic GFR-binding peptide
  MOD_RES (14), (15): Xaa is C or S
FFLMSLSSLETPVXXAKPIK

SEQ ID NO: 10741 - protein, 13 aa, Artificial Sequence
  Cyclic GFR-binding peptide
FFLMSLSSMKTPT

SEQ ID NO: 10742 - protein, 16 aa, Artificial Sequence
  Cyclic GFR-binding peptide
IVNSSDDFFLVSLSSL

SEQ ID NO: 10743 - protein, 14 aa, Artificial Sequence
  Cyclic GFR-binding peptide
  MOD_RES (14), (14): Xaa is C or S
FFLMSLSSEETPVX

SEQ ID NO: 10744 - protein, 17 aa, Artificial Sequence
  Cyclic GFR-binding peptide
  MOD_RES (14), (15): Xaa is C or S
FFLMSLSSMKTPTXXPG

SEQ ID NO: 10745 - protein, 20 aa, Artificial Sequence
  Cyclic GFR-binding peptide
  MOD_RES (14), (15): Xaa is C or S
FFLVSLSSLQTPAXXPKPVT

SEQ ID NO: 10746 - protein, 18 aa, Artificial Sequence
  Cyclic GFR-binding peptide
VVKENEDFFLMSLSSLET

SEQ ID NO: 10747 - protein, 23 aa, Artificial Sequence
  Cyclic GFR-binding peptide
  MOD_RES (19), (19): Xaa is C or S
VYEFFLVSLSSHHVRSPQXKVSS

SEQ ID NO: 10748 - protein, 18 aa, Artificial Sequence
  Cyclic GFR-binding peptide
  MOD_RES (14), (15): Xaa is C or S
FFLISLSSLDQPVXXPSA

SEQ ID NO: 10749 - protein, 17 aa, Artificial Sequence
  Cyclic GFR-binding peptide
YTVVGKDFFLISLSSLK

SEQ ID NO: 10750 - protein, 26 aa, Artificial Sequence
  Cyclic GFR-binding peptide
  MOD_RES (20), (21): Xaa is C or S
VNSSDDFFLVSLSSLKTPAXXPKPVH

SEQ ID NO: 10751 - protein, 21 aa, Artificial Sequence
  Cyclic GFR-binding peptide
  MOD_RES (15), (15): Xaa is C or S
RFFLMSLSSEETPVXELGEDN

SEQ ID NO: 10752 - protein, 23 aa, Artificial Sequence
  Cyclic GFR-binding peptide
  MOD_RES (17), (18): Xaa is C or S
YEDFFLMSLSSLETPVXXAKPIS

SEQ ID NO: 10753 - protein, 21 aa, Artificial Sequence
  Cyclic GFR-binding peptide
  MOD_RES (15), (16): Xaa is C or S
DFFLMSLSSTKVPAXXTSPVR

SEQ ID NO: 10754 - protein, 24 aa, Artificial Sequence
  Cyclic GFR-binding peptide
  MOD_RES (18), (19): Xaa is C or S
QKDNFFLMSLSSMKTPTXXPGASG

SEQ ID NO: 10755 - protein, 20 aa, Artificial Sequence
  Cyclic GFR-binding peptide
  MOD_RES (14), (15): Xaa is C or S
FFLMSLSSTKVPAXXTSPVR

SEQ ID NO: 10756 - protein, 13 aa, Artificial Sequence
  Cyclic GFR-binding peptide
FFLISLSSLDQSV

SEQ ID NO: 10757 - protein, 27 aa, Artificial Sequence
  Cyclic GFR-binding peptide
  MOD_RES (21), (22): Xaa is C or S
VVNNASDFFLISLSSLRTPVXXTPPTS

SEQ ID NO: 10758 - protein, 24 aa, Artificial Sequence
  Cyclic GFR-binding peptide
  MOD_RES (18), (19): Xaa is C or S
NAADFFLISLSSLRAPVXXSAPAA

SEQ ID NO: 10759 - protein, 17 aa, Artificial Sequence
  Cyclic GFR-binding peptide
  MOD_RES (14), (14): Xaa is C or S
FFLVSLSSLKTPAXTPK

SEQ ID NO: 10760 - protein, 19 aa, Artificial Sequence
  Cyclic GFR-binding peptide
IKPTKGIFFLISLSSLDQS

SEQ ID NO: 10761 - protein, 19 aa, Artificial Sequence
  Cyclic GFR-binding peptide
  MOD_RES (14), (14): Xaa is C or S
FFLVSLSSLKTPAXTPKTV

SEQ ID NO: 10762 - protein, 18 aa, Artificial Sequence
  Cyclic GFR-binding peptide
  MOD_RES (14), (15): Xaa is C or S
FFLISLSSLRAPVXXSAP

SEQ ID NO: 10763 - protein, 16 aa, Artificial Sequence
  Cyclic GFR-binding peptide
  MOD_RES (14), (15): Xaa is C or S
FFLISLSSLRTPVXXT

SEQ ID NO: 10764 - protein, 18 aa, Artificial Sequence
  Cyclic GFR-binding peptide
  MOD_RES (14), (15): Xaa is C or S
FFLMSLSSLETPVXXAKP

SEQ ID NO: 10765 - protein, 17 aa, Artificial Sequence
  Cyclic GFR-binding peptide
  MOD_RES (14), (15): Xaa is C or S
FFLISLSSLRAPVXXSA

SEQ ID NO: 10766 - protein, 23 aa, Artificial Sequence
  Cyclic GFR-binding peptide
  MOD_RES (17), (18): Xaa is C or S
GKDFFLISLSSLKTPVXXAKSAK

SEQ ID NO: 10767 - protein, 17 aa, Artificial Sequence
  Cyclic GFR-binding peptide
IVNNSSDFFLVSLSSLK

SEQ ID NO: 10768 - protein, 28 aa, Artificial Sequence
  Cyclic GFR-binding peptide
  MOD_RES (24), (24): Xaa is C or S
KPKKRVYEFFLVSLSSHHVRSPQXKVSS

SEQ ID NO: 10769 - protein, 17 aa, Artificial Sequence
  Cyclic GFR-binding peptide
  MOD_RES (14), (15): Xaa is C or S
FFLISLSSLAQPVXXPA

SEQ ID NO: 10770 - protein, 23 aa, Artificial Sequence
  Cyclic GFR-binding peptide
  MOD_RES (17), (18): Xaa is C or S
MDDFFLVSLSSLKTPVXXAKGVK

SEQ ID NO: 10771 - protein, 22 aa, Artificial Sequence
  Cyclic GFR-binding peptide
  MOD_RES (16), (17): Xaa is C or S
EDFFLMSLSSLETPVXXAKPIS

SEQ ID NO: 10772 - protein, 21 aa, Artificial Sequence
  Cyclic GFR-binding peptide
  MOD_RES (15), (16): Xaa is C or S
DFFLMSLSSLETPVXXAKPIS

SEQ ID NO: 10773 - protein, 27 aa, Artificial Sequence
  Cyclic GFR-binding peptide
  MOD_RES (21), (22): Xaa is C or S
IIQQKDNFFLMSLSSMKTPTXXPGASG

SEQ ID NO: 10774 - protein, 21 aa, Artificial Sequence
  Cyclic GFR-binding peptide
HQGQHPKIRFFLMSLSSEETP

SEQ ID NO: 10775 - protein, 19 aa, Artificial Sequence
  Cyclic GFR-binding peptide
  MOD_RES (14), (15): Xaa is C or S
FFLMSLSSLETPVXXAKPI

SEQ ID NO: 10776 - protein, 19 aa, Artificial Sequence
  Cyclic GFR-binding peptide
  MOD_RES (14), (15): Xaa is C or S
FFLMSLSSTKVPAXXTSPV

SEQ ID NO: 10777 - protein, 15 aa, Artificial Sequence
  Cyclic GFR-binding peptide
  MOD_RES (14), (15): Xaa is C or S
FFLVSLSSLQTPAXX

SEQ ID NO: 10778 - protein, 27 aa, Artificial Sequence
  Cyclic GFR-binding peptide
  MOD_RES (21), (22): Xaa is C or S
IVNSSDDFFLVSLSSLKTPAXXPKPVY

SEQ ID NO: 10779 - protein, 17 aa, Artificial Sequence
  Cyclic GFR-binding peptide
LLVRGNDFFLMSLSSTK

SEQ ID NO: 10780 - protein, 17 aa, Artificial Sequence
  Cyclic GFR-binding peptide
IKPTKGIFFLISLSSLD

SEQ ID NO: 10781 - protein, 15 aa, Artificial Sequence
  Cyclic GFR-binding peptide
IIQQKDNFFLMSLSS

SEQ ID NO: 10782 - protein, 13 aa, Artificial Sequence
  Cyclic GFR-binding peptide
FFLISLSSLRAPV

SEQ ID NO: 10783 - protein, 14 aa, Artificial Sequence
  Cyclic GFR-binding peptide
  MOD_RES (14), (14): Xaa is C or S
FFLISLSSLRTPVX

SEQ ID NO: 10784 - protein, 15 aa, Artificial Sequence
  Cyclic GFR-binding peptide
  MOD_RES (14), (15): Xaa is C or S
FFLISLSSLKTPVXX

SEQ ID NO: 10785 - protein, 20 aa, Artificial Sequence
  Cyclic GFR-binding peptide
  MOD_RES (14), (15): Xaa is C or S
FFLISLSSLKTPVXXAKSAK

SEQ ID NO: 10786 - protein, 20 aa, Artificial Sequence
  Cyclic GFR-binding peptide
  MOD_RES (14), (15): Xaa is C or S
FFLVSLSSLKTPAXXPKPVH

SEQ ID NO: 10787 - protein, 16 aa, Artificial Sequence
  Cyclic GFR-binding peptide
VVNNAADFFLISLSSL

SEQ ID NO: 10788 - protein, 22 aa, Artificial Sequence
  Cyclic GFR-binding peptide
  MOD_RES (16), (17): Xaa is C or S
SDFFLVSLSSLKTPAXXAKPVA

SEQ ID NO: 10789 - protein, 16 aa, Artificial Sequence
  Cyclic GFR-binding peptide
VKPTRGVFFLISLSSL

SEQ ID NO: 10790 - protein, 25 aa, Artificial Sequence
  Cyclic GFR-binding peptide
  MOD_RES (19), (20): Xaa is C or S
VGMDDFFLVSLSSLKTPVXXAKGVK

SEQ ID NO: 10791 - protein, 21 aa, Artificial Sequence
  Cyclic GFR-binding peptide
  MOD_RES (15), (16): Xaa is C or S
DFFLVSLSSLKTPVXXAKGVK

SEQ ID NO: 10792 - protein, 19 aa, Artificial Sequence
  Cyclic GFR-binding peptide
  MOD_RES (14), (15): Xaa is C or S
FFLISLSSLDQSVXXPSAS

SEQ ID NO: 10793 - protein, 16 aa, Artificial Sequence
  Cyclic GFR-binding peptide
  MOD_RES (14), (15): Xaa is C or S
FFLVSLSSLKTPAXXA

SEQ ID NO: 10794 - protein, 24 aa, Artificial Sequence
  Cyclic GFR-binding peptide
  MOD_RES (18), (19): Xaa is C or S
ENEDFFLMSLSSLETPVXXAKPIK

SEQ ID NO: 10795 - protein, 25 aa, Artificial Sequence
  Cyclic GFR-binding peptide
  MOD_RES (19), (20): Xaa is C or S
PTRGVFFLISLSSLDQPVXXPSASA

SEQ ID NO: 10796 - protein, 22 aa, Artificial Sequence
  Cyclic GFR-binding peptide
  MOD_RES (16), (17): Xaa is C or S
NDFFLMSLSSTKVPAXXTSPVR

SEQ ID NO: 10797 - protein, 23 aa, Artificial Sequence
  Cyclic GFR-binding peptide
  MOD_RES (17), (18): Xaa is C or S
RGVFFLISLSSLAQPVXXPAASA

SEQ ID NO: 10798 - protein, 16 aa, Artificial Sequence
  Cyclic GFR-binding peptide
VVKENEDFFLMSLSSL

SEQ ID NO: 10799 - protein, 18 aa, Artificial Sequence
  Cyclic GFR-binding peptide
LKPKKRVYEFFLVSLSSH

SEQ ID NO: 10800 - protein, 26 aa, Artificial Sequence
  Cyclic GFR-binding peptide
  MOD_RES (20), (21): Xaa is C or S
VKENEDFFLMSLSSLETPVXXAKPIK

SEQ ID NO: 10801 - protein, 19 aa, Artificial Sequence
  Cyclic GFR-binding peptide
  MOD_RES (14), (15): Xaa is C or S
FFLVSLSSLKTPAXXPKPV

SEQ ID NO: 10802 - protein, 17 aa, Artificial Sequence
  Cyclic GFR-binding peptide
  MOD_RES (14), (15): Xaa is C or S
FFLVSLSSLKTPVXXAK

SEQ ID NO: 10803 - protein, 19 aa, Artificial Sequence
  Cyclic GFR-binding peptide
  MOD_RES (14), (14): Xaa is C or S
FFLMSLSSEETPVXELGED

SEQ ID NO: 10804 - protein, 14 aa, Artificial Sequence
  Cyclic GFR-binding peptide
  MOD_RES (14), (14): Xaa is C or S
FFLVSLSSLKTPAX

SEQ ID NO: 10805 - protein, 17 aa, Artificial Sequence
  Cyclic GFR-binding peptide
VVKENEDFFLMSLSSLE

SEQ ID NO: 10806 - protein, 27 aa, Artificial Sequence
  Cyclic GFR-binding peptide
  MOD_RES (21), (22): Xaa is C or S
YTVVGKDFFLISLSSLKTPVXXAKSAK

SEQ ID NO: 10807 - protein, 24 aa, Artificial Sequence
  Cyclic GFR-binding peptide
  MOD_RES (18), (19): Xaa is C or S
TKGIFFLISLSSLDQSVXXPSASA

SEQ ID NO: 10808 - protein, 18 aa, Artificial Sequence
  Cyclic GFR-binding peptide
  MOD_RES (14), (15): Xaa is C or S
FFLVSLSSLKTPVXXAKG

SEQ ID NO: 10809 - protein, 27 aa, Artificial Sequence
  Cyclic GFR-binding peptide
  MOD_RES (21), (22): Xaa is C or S
VKPKRGVFFLISLSSLAQPVXXPAASA

SEQ ID NO: 10810 - protein, 20 aa, Artificial Sequence
  Cyclic GFR-binding peptide
  MOD_RES (14), (15): Xaa is C or S
FFLISLSSLDQSVXXPSASA

SEQ ID NO: 10811 - protein, 24 aa, Artificial Sequence
  Cyclic GFR-binding peptide
  MOD_RES (18), (19): Xaa is C or S
SSDDFFLVSLSSLKTPAXXPKPVH

SEQ ID NO: 10812 - protein, 18 aa, Artificial Sequence
  Cyclic GFR-binding peptide
TPVGMDDFFLVSLSSLKT

SEQ ID NO: 10813 - protein, 26 aa, Artificial Sequence
  Cyclic GFR-binding peptide
  MOD_RES (20), (21): Xaa is C or S
KPKRGVFFLISLSSLAQPVXXPAASA

SEQ ID NO: 10814 - protein, 16 aa, Artificial Sequence
  Cyclic GFR-binding peptide
VVNNASDFFLISLSSL

SEQ ID NO: 10815 - protein, 13 aa, Artificial Sequence
  Cyclic GFR-binding peptide
FFLMSLSSEETPV

SEQ ID NO: 10816 - protein, 18 aa, Artificial Sequence
  Cyclic GFR-binding peptide
VKPKRGVFFLISLSSLAQ

SEQ ID NO: 10817 - protein, 22 aa, Artificial Sequence
  Cyclic GFR-binding peptide
  MOD_RES (16), (17): Xaa is C or S
DDFFLVSLSSLKTPAXXPKPVH

SEQ ID NO: 10818 - protein, 25 aa, Artificial Sequence
  Cyclic GFR-binding peptide
  MOD_RES (19), (19): Xaa is C or S
HPKIRFFLMSLSSEETPVXELGEDN

SEQ ID NO: 10819 - protein, 17 aa, Artificial Sequence
  Cyclic GFR-binding peptide
  MOD_RES (14), (15): Xaa is C or S
FFLMSLSSLETPVXXAK

SEQ ID NO: 10820 - protein, 21 aa, Artificial Sequence
  Cyclic GFR-binding peptide
  MOD_RES (15), (15): Xaa is C or S
DFFLVSLSSLKTPAXTPKTVH

SEQ ID NO: 10821 - protein, 16 aa, Artificial Sequence
  Cyclic GFR-binding peptide
TPVGMDDFFLVSLSSL

SEQ ID NO: 10822 - protein, 16 aa, Artificial Sequence
  Cyclic GFR-binding peptide
  MOD_RES (14), (15): Xaa is C or S
FFLISLSSLAQPVXXP

SEQ ID NO: 10823 - protein, 20 aa, Artificial Sequence
  Cyclic GFR-binding peptide
  MOD_RES (14), (15): Xaa is C or S
FFLVSLSSLKTPAXXAKPVA

SEQ ID NO: 10824 - protein, 19 aa, Artificial Sequence
  Cyclic GFR-binding peptide
  MOD_RES (14), (15): Xaa is C or S
FFLISLSSLRTPVXXTPPT

SEQ ID NO: 10825 - protein, 21 aa, Artificial Sequence
  Cyclic GFR-binding peptide
  MOD_RES (17), (17): Xaa is C or S
EFFLVSLSSHHVRSPQXKVSS

SEQ ID NO: 10826 - protein, 19 aa, Artificial Sequence
  Cyclic GFR-binding peptide
  MOD_RES (14), (15): Xaa is C or S
FFLISLSSLKTPVXXAKSA

SEQ ID NO: 10827 - protein, 15 aa, Artificial Sequence
  Cyclic GFR-binding peptide
IVNNSSDFFLVSLSS

SEQ ID NO: 10828 - protein, 25 aa, Artificial Sequence
  Cyclic GFR-binding peptide
  MOD_RES (19), (20): Xaa is C or S
KENEDFFLMSLSSLETPVXXAKPIK

SEQ ID NO: 10829 - protein, 15 aa, Artificial Sequence
  Cyclic GFR-binding peptide
  MOD_RES (14), (14): Xaa is C or S
FFLMSLSSEETPVXE

SEQ ID NO: 10830 - protein, 21 aa, Artificial Sequence
  Cyclic GFR-binding peptide
  MOD_RES (15), (16): Xaa is C or S
VFFLISLSSLDQPVXXPSASA

SEQ ID NO: 10831 - protein, 21 aa, Artificial Sequence
  Cyclic GFR-binding peptide
  MOD_RES (15), (16): Xaa is C or S
DFFLVSLSSLQTPAXXPKPVT

SEQ ID NO: 10832 - protein, 21 aa, Artificial Sequence
  Cyclic GFR-binding peptide
  MOD_RES (15), (16): Xaa is C or S
NFFLMSLSSMKTPTXXPGASG

SEQ ID NO: 10833 - protein, 26 aa, Artificial Sequence
  Cyclic GFR-binding peptide
  MOD_RES (20), (21): Xaa is C or S
VKDYEDFFLMSLSSLETPVXXAKPIS

SEQ ID NO: 10834 - protein, 14 aa, Artificial Sequence
  Cyclic GFR-binding peptide
  MOD_RES (14), (14): Xaa is C or S
FFLMSLSSTKVPAX

SEQ ID NO: 10835 - protein, 17 aa, Artificial Sequence
  Cyclic GFR-binding peptide
  MOD_RES (14), (15): Xaa is C or S
FFLISLSSLDQPVXXPS

SEQ ID NO: 10836 - protein, 23 aa, Artificial Sequence
  Cyclic GFR-binding peptide
  MOD_RES (6), (7): Xaa is C or S
HVPKPXXAPTKLSSLSVLFFDDS

SEQ ID NO: 10837 - protein, 18 aa, Artificial Sequence
  Cyclic GFR-binding peptide
TKLSSLSVLFFDDSSNVI

SEQ ID NO: 10838 - protein, 27 aa, Artificial Sequence
  Cyclic GFR-binding peptide
  MOD_RES (7), (7): Xaa is C or S
HVTKPTXAPTKLSSLSVLFFDDSSNVI

SEQ ID NO: 10839 - protein, 15 aa, Artificial Sequence
  Cyclic GFR-binding peptide
  MOD_RES (2), (2): Xaa is C or S
TXAPTKLSSLSVLFF

SEQ ID NO: 10840 - protein, 20 aa, Artificial Sequence
  Cyclic GFR-binding peptide
  MOD_RES (6), (7): Xaa is C or S
YVPKPXXAPTKLSSLSVLFF

SEQ ID NO: 10841 - protein, 25 aa, Artificial Sequence
  Cyclic GFR-binding peptide
  MOD_RES (6), (7): Xaa is C or S
AVPKAXXAPTKLSSLSVLFFDSSNN

SEQ ID NO: 10842 - protein, 23 aa, Artificial Sequence
  Cyclic GFR-binding peptide
  MOD_RES (6), (7): Xaa is C or S
GSAGPXXTPTKMSSLSMLFFNDK

SEQ ID NO: 10843 - protein, 24 aa, Artificial Sequence
  Cyclic GFR-binding peptide
  MOD_RES (6), (7): Xaa is C or S
TVPKPXXAPTQLSSLSVLFFDDSS

SEQ ID NO: 10844 - protein, 20 aa, Artificial Sequence
  Cyclic GFR-binding peptide
  MOD_RES (6), (7): Xaa is C or S
ASAAPXXVPQALSSLSILFF

SEQ ID NO: 10845 - protein, 25 aa, Artificial Sequence
  Cyclic GFR-binding peptide
  MOD_RES (6), (7): Xaa is C or S
STPPTXXVPTRLSSLSILFFDSANN

SEQ ID NO: 10846 - protein, 15 aa, Artificial Sequence
  Cyclic GFR-binding peptide
SSLSILFFDKGVVTY

SEQ ID NO: 10847 - protein, 18 aa, Artificial Sequence
  Cyclic GFR-binding peptide
  MOD_RES (5), (5): Xaa is C or S
EGLEXVPTEESSLSMLFF

SEQ ID NO: 10848 - protein, 19 aa, Artificial Sequence
  Cyclic GFR-binding peptide
  MOD_RES (5), (6): Xaa is C or S
VPKAXXAPTKLSSLSVLFF

SEQ ID NO: 10849 - protein, 15 aa, Artificial Sequence
  Cyclic GFR-binding peptide
SSLSILFFDSANNVV

SEQ ID NO: 10850 - protein, 15 aa, Artificial Sequence
  Cyclic GFR-binding peptide
  MOD_RES (1), (2): Xaa is C or S
XXVSQDLSSLSILFF

SEQ ID NO: 10851 - protein, 19 aa, Artificial Sequence
  Cyclic GFR-binding peptide
EESSLSMLFFRIKPHQGQH

SEQ ID NO: 10852 - protein, 17 aa, Artificial Sequence
  Cyclic GFR-binding peptide
KLSSLSVLFFDDMGVPT

SEQ ID NO: 10853 - protein, 14 aa, Artificial Sequence
  Cyclic GFR-binding peptide
  MOD_RES (1), (1): Xaa is C or S
XTPTKMSSLSMLFF

SEQ ID NO: 10854 - protein, 18 aa, Artificial Sequence
  Cyclic GFR-binding peptide
TELSSLSMLFFDEYDKVV

SEQ ID NO: 10855 - protein, 13 aa, Artificial Sequence
  Cyclic GFR-binding peptide
APVKTSSLSMLFF

SEQ ID NO: 10856 - protein, 26 aa, Artificial Sequence
  Cyclic GFR-binding peptide
  MOD_RES (6), (7): Xaa is C or S
YVPKPXXAPTKLSSLSVLFFDDSSNV

SEQ ID NO: 10857 - protein, 18 aa, Artificial Sequence
  Cyclic GFR-binding peptide
ESSLSMLFFRIKPHQGQH

SEQ ID NO: 10858 - protein, 18 aa, Artificial Sequence
  Cyclic GFR-binding peptide
  MOD_RES (4), (5): Xaa is C or S
PKAXXAPTKLSSLSVLFF

SEQ ID NO: 10859 - protein, 18 aa, Artificial Sequence
  Cyclic GFR-binding peptide
TQLSSLSVLFFDDSSNVI

SEQ ID NO: 10860 - protein, 22 aa, Artificial Sequence
  Cyclic GFR-binding peptide
  MOD_RES (6), (7): Xaa is C or S
GSAGPXXTPTKMSSLSMLFFND

SEQ ID NO: 10861 - protein, 16 aa, Artificial Sequence
  Cyclic GFR-binding peptide
  MOD_RES (2), (3): Xaa is C or S
TXXAPVKTSSLSMLFF

SEQ ID NO: 10862 - protein, 27 aa, Artificial Sequence
  Cyclic GFR-binding peptide
  MOD_RES (5), (5): Xaa is C or S
SSVKXQPSRVHHSSLSVLFFEYVRKKP

SEQ ID NO: 10863 - protein, 18 aa, Artificial Sequence
  Cyclic GFR-binding peptide
TKLSSLSVLFFDSSNNVI

SEQ ID NO: 10864 - protein, 22 aa, Artificial Sequence
  Cyclic GFR-binding peptide
  MOD_RES (5), (5): Xaa is C or S
SSVKXQPSRVHHSSLSVLFFEY

SEQ ID NO: 10865 - protein, 19 aa, Artificial Sequence
  Cyclic GFR-binding peptide
HHSSLSVLFFEYVRKKPKL

SEQ ID NO: 10866 - protein, 23 aa, Artificial Sequence
  Cyclic GFR-binding peptide
  MOD_RES (6), (7): Xaa is C or S
YVPKPXXAPTKLSSLSVLFFDDS

SEQ ID NO: 10867 - protein, 24 aa, Artificial Sequence
  Cyclic GFR-binding peptide
  MOD_RES (6), (7): Xaa is C or S
KVGKAXXVPTKLSSLSVLFFDDMG

SEQ ID NO: 10868 - protein, 20 aa, Artificial Sequence
  Cyclic GFR-binding peptide
  MOD_RES (6), (7): Xaa is C or S
SIPKAXXVPTELSSLSMLFF

SEQ ID NO: 10869 - protein, 17 aa, Artificial Sequence
  Cyclic GFR-binding peptide
SSLSVLFFEYVRKKPKL

SEQ ID NO: 10870 - protein, 22 aa, Artificial Sequence
  Cyclic GFR-binding peptide
  MOD_RES (6), (7): Xaa is C or S
ASASPXXVSQDLSSLSILFFIG

SEQ ID NO: 10871 - protein, 17 aa, Artificial Sequence
  Cyclic GFR-binding peptide
KMSSLSMLFFNDKQQII

SEQ ID NO: 10872 - protein, 22 aa, Artificial Sequence
  Cyclic GFR-binding peptide
  MOD_RES (6), (7): Xaa is C or S
ASASPXXVPQDLSSLSILFFVG

SEQ ID NO: 10873 - protein, 19 aa, Artificial Sequence
  Cyclic GFR-binding peptide
PVKTSSLSMLFFDNGRVLL

SEQ ID NO: 10874 - protein, 18 aa, Artificial Sequence
  Cyclic GFR-binding peptide
QDLSSLSILFFVGRTPKV

SEQ ID NO: 10875 - protein, 25 aa, Artificial Sequence
  Cyclic GFR-binding peptide
  MOD_RES (7), (7): Xaa is C or S
HVTKPTXAPTKLSSLSVLFFDDSSN

SEQ ID NO: 10876 - protein, 17 aa, Artificial Sequence
  Cyclic GFR-binding peptide
  MOD_RES (4), (4): Xaa is C or S
GLEXVPTEESSLSMLFF

SEQ ID NO: 10877 - protein, 27 aa, Artificial Sequence
  Cyclic GFR-binding peptide
  MOD_RES (7), (7): Xaa is C or S
NDEGLEXVPTEESSLSMLFFRIKPHQG

SEQ ID NO: 10878 - protein, 13 aa, Artificial Sequence
  Cyclic GFR-binding peptide
APTKLSSLSVLFF

SEQ ID NO: 10879 - protein, 21 aa, Artificial Sequence
  Cyclic GFR-binding peptide
RVHHSSLSVLFFEYVRKKPKL

SEQ ID NO: 10880 - protein, 18 aa, Artificial Sequence
  Cyclic GFR-binding peptide
TKLSSLSILFFDKGVVTY

SEQ ID NO: 10881 - protein, 22 aa, Artificial Sequence
  Cyclic GFR-binding peptide
  MOD_RES (6), (7): Xaa is C or S
STPPTXXVPTRLSSLSILFFDS

SEQ ID NO: 10882 - protein, 16 aa, Artificial Sequence
  Cyclic GFR-binding peptide
  MOD_RES (2), (3): Xaa is C or S
AXXVPTELSSLSMLFF

SEQ ID NO: 10883 - protein, 17 aa, Artificial Sequence
  Cyclic GFR-binding peptide
QLSSLSVLFFDDSSNVI

SEQ ID NO: 10884 - protein, 27 aa, Artificial Sequence
  Cyclic GFR-binding peptide
  MOD_RES (6), (7): Xaa is C or S
AAPASXXVPARLSSLSILFFDAANNVV

SEQ ID NO: 10885 - protein, 18 aa, Artificial Sequence
  Cyclic GFR-binding peptide
  MOD_RES (4), (5): Xaa is C or S
PKPXXAPTQLSSLSVLFF

SEQ ID NO: 10886 - protein, 23 aa, Artificial Sequence
  Cyclic GFR-binding peptide
  MOD_RES (6), (7): Xaa is C or S
AAPASXXVPARLSSLSILFFDAA

SEQ ID NO: 10887 - protein, 27 aa, Artificial Sequence
  Cyclic GFR-binding peptide
  MOD_RES (6), (7): Xaa is C or S
RVPSTXXAPVKTSSLSMLFFDNGRVLL

SEQ ID NO: 10888 - protein, 21 aa, Artificial Sequence
  Cyclic GFR-binding peptide
  MOD_RES (6), (7): Xaa is C or S
STPPTXXVPTRLSSLSILFFD

SEQ ID NO: 10889 - protein, 27 aa, Artificial Sequence
  Cyclic GFR-binding peptide
  MOD_RES (6), (7): Xaa is C or S
TVPKPXXAPTQLSSLSVLFFDDSSNVI

SEQ ID NO: 10890 - protein, 26 aa, Artificial Sequence
  Cyclic GFR-binding peptide
  MOD_RES (6), (7): Xaa is C or S
KASKAXXVPTKLSSLSILFFDKGVVT

SEQ ID NO: 10891 - protein, 15 aa, Artificial Sequence
  Cyclic GFR-binding peptide
  MOD_RES (1), (2): Xaa is C or S
XXVPTRLSSLSILFF

SEQ ID NO: 10892 - protein, 19 aa, Artificial Sequence
  Cyclic GFR-binding peptide
PQALSSLSILFFVGRKPKV

SEQ ID NO: 10893 - protein, 20 aa, Artificial Sequence
  Cyclic GFR-binding peptide
VHHSSLSVLFFEYVRKKPKL

SEQ ID NO: 10894 - protein, 16 aa, Artificial Sequence
  Cyclic GFR-binding peptide
  MOD_RES (2), (3): Xaa is C or S
SXXVPARLSSLSILFF

SEQ ID NO: 10895 - protein, 14 aa, Artificial Sequence
  Cyclic GFR-binding peptide
  MOD_RES (1), (1): Xaa is C or S
XVPQDLSSLSILFF

SEQ ID NO: 10896 - protein, 17 aa, Artificial Sequence
  Cyclic GFR-binding peptide
KLSSLSVLFFDDSSNVI

SEQ ID NO: 10897 - protein, 19 aa, Artificial Sequence
  Cyclic GFR-binding peptide
  MOD_RES (5), (6): Xaa is C or S
VPKPXXAPTQLSSLSVLFF

SEQ ID NO: 10898 - protein, 14 aa, Artificial Sequence
  Cyclic GFR-binding peptide
  MOD_RES (1), (1): Xaa is C or S
XVPTELSSLSMLFF

SEQ ID NO: 10899 - protein, 14 aa, Artificial Sequence
  Cyclic GFR-binding peptide
  MOD_RES (1), (1): Xaa is C or S
XAPTQLSSLSVLFF

SEQ ID NO: 10900 - protein, 14 aa, Artificial Sequence
  Cyclic GFR-binding peptide
  MOD_RES (1), (1): Xaa is C or S
XVPQALSSLSILFF

SEQ ID NO: 10901 - protein, 16 aa, Artificial Sequence
  Cyclic GFR-binding peptide
  MOD_RES (3), (3): Xaa is C or S
LEXVPTEESSLSMLFF

SEQ ID NO: 10902 - protein, 15 aa, Artificial Sequence
  Cyclic GFR-binding peptide
  MOD_RES (1), (2): Xaa is C or S
XXAPVKTSSLSMLFF

SEQ ID NO: 10903 - protein, 14 aa, Artificial Sequence
  Cyclic GFR-binding peptide
PSRVHHSSLSVLFF

SEQ ID NO: 10904 - protein, 19 aa, Artificial Sequence
  Cyclic GFR-binding peptide
  MOD_RES (5), (6): Xaa is C or S
SASPXXVPQDLSSLSILFF

SEQ ID NO: 10905 - protein, 16 aa, Artificial Sequence
  Cyclic GFR-binding peptide
  MOD_RES (2), (3): Xaa is C or S
PXXVSQDLSSLSILFF

SEQ ID NO: 10906 - protein, 24 aa, Artificial Sequence
  Cyclic GFR-binding peptide
  MOD_RES (6), (7): Xaa is C or S
YVPKPXXAPTKLSSLSVLFFDDSS

SEQ ID NO: 10907 - protein, 24 aa, Artificial Sequence
  Cyclic GFR-binding peptide
  MOD_RES (6), (7): Xaa is C or S
RVPSTXXAPVKTSSLSMLFFDNGR

SEQ ID NO: 10908 - protein, 15 aa, Artificial Sequence
  Cyclic GFR-binding peptide
QPSRVHHSSLSVLFF

SEQ ID NO: 10909 - protein, 15 aa, Artificial Sequence
  Cyclic GFR-binding peptide
SSLSILFFVGRTPKV

SEQ ID NO: 10910 - protein, 25 aa, Artificial Sequence
  Cyclic GFR-binding peptide
  MOD_RES (6), (7): Xaa is C or S
ASASPXXVSQDLSSLSILFFIGKTP

SEQ ID NO: 10911 - protein, 14 aa, Artificial Sequence
  Cyclic GFR-binding peptide
  MOD_RES (1), (1): Xaa is C or S
XVPTKLSSLSILFF

SEQ ID NO: 10912 - protein, 17 aa, Artificial Sequence
  Cyclic GFR-binding peptide
ELSSLSMLFFDEYDKVV

SEQ ID NO: 10913 - protein, 21 aa, Artificial Sequence
  Cyclic GFR-binding peptide
  MOD_RES (6), (7): Xaa is C or S
YVPKPXXAPTKLSSLSVLFFD

SEQ ID NO: 10914 - protein, 13 aa, Artificial Sequence
  Cyclic GFR-binding peptide
VPTKLSSLSVLFF

SEQ ID NO: 10915 - protein, 24 aa, Artificial Sequence
  Cyclic GFR-binding peptide
  MOD_RES (6), (7): Xaa is C or S
KASKAXXVPTKLSSLSILFFDKGV

SEQ ID NO: 10916 - protein, 24 aa, Artificial Sequence
  Cyclic GFR-binding peptide
  MOD_RES (6), (7): Xaa is C or S
AVPKAXXAPTKLSSLSVLFFDSSN

SEQ ID NO: 10917 - protein, 25 aa, Artificial Sequence
  Cyclic GFR-binding peptide
  MOD_RES (6), (7): Xaa is C or S
KASKAXXVPTKLSSLSILFFDKGVV

SEQ ID NO: 10918 - protein, 20 aa, Artificial Sequence
  Cyclic GFR-binding peptide
TEESSLSMLFFRIKPHQGQH

SEQ ID NO: 10919 - protein, 19 aa, Artificial Sequence
  Cyclic GFR-binding peptide
PTRLSSLSILFFDSANNVV

SEQ ID NO: 10920 - protein, 18 aa, Artificial Sequence
  Cyclic GFR-binding peptide
  MOD_RES (4), (5): Xaa is C or S
AAPXXVPQALSSLSILFF

SEQ ID NO: 10921 - protein, 28 aa, Artificial Sequence
  Cyclic GFR-binding peptide
  MOD_RES (7), (7): Xaa is C or S
NDEGLEXVPTEESSLSMLFFRIKPHQGQ

SEQ ID NO: 10922 - protein, 19 aa, Artificial Sequence
  Cyclic GFR-binding peptide
PTELSSLSMLFFDENEKVV

SEQ ID NO: 10923 - protein, 19 aa, Artificial Sequence
  Cyclic GFR-binding peptide
PARLSSLSILFFDAANNVV

SEQ ID NO: 10924 - protein, 22 aa, Artificial Sequence
  Cyclic GFR-binding peptide
  MOD_RES (6), (7): Xaa is C or S
AAPASXXVPARLSSLSILFFDA

SEQ ID NO: 10925 - protein, 25 aa, Artificial Sequence
  Cyclic GFR-binding peptide
  MOD_RES (6), (7): Xaa is C or S
AAPASXXVPARLSSLSILFFDAANN

SEQ ID NO: 10926 - protein, 18 aa, Artificial Sequence
  Cyclic GFR-binding peptide
  MOD_RES (4), (5): Xaa is C or S
PSTXXAPVKTSSLSMLFF

SEQ ID NO: 10927 - protein, 24 aa, Artificial Sequence
  Cyclic GFR-binding peptide
  MOD_RES (7), (7): Xaa is C or S
HVTKPTXAPTKLSSLSVLFFDDSS

SEQ ID NO: 10928 - protein, 26 aa, Artificial Sequence
  Cyclic GFR-binding peptide
  MOD_RES (7), (7): Xaa is C or S
HVTKPTXAPTKLSSLSVLFFDDSSNV

SEQ ID NO: 10929 - protein, 24 aa, Artificial Sequence
  Cyclic GFR-binding peptide
  MOD_RES (6), (7): Xaa is C or S
ASASPXXVPQDLSSLSILFFVGRT

SEQ ID NO: 10930 - protein, 16 aa, Artificial Sequence
  Cyclic GFR-binding peptide
  MOD_RES (2), (3): Xaa is C or S
AXXVPTKLSSLSVLFF

SEQ ID NO: 10931 - protein, 16 aa, Artificial Sequence
  Cyclic GFR-binding peptide
LSSLSILFFVGRKPKV

SEQ ID NO: 10932 - protein, 22 aa, Artificial Sequence
  Cyclic GFR-binding peptide
  MOD_RES (6), (7): Xaa is C or S
KVGKAXXVPTKLSSLSVLFFDD

SEQ ID NO: 10933 - protein, 16 aa, Artificial Sequence
  Cyclic GFR-binding peptide
  MOD_RES (2), (3): Xaa is C or S
PXXAPTKLSSLSVLFF

SEQ ID NO: 10934 - protein, 16 aa, Artificial Sequence
  Cyclic GFR-binding peptide
  MOD_RES (2), (3): Xaa is C or S
PXXAPTQLSSLSVLFF

SEQ ID NO: 10935 - protein, 20 aa, Artificial Sequence
  Cyclic GFR-binding peptide
  MOD_RES (6), (7): Xaa is C or S
KVGKAXXVPTKLSSLSVLFF

SEQ ID NO: 10936 - protein, 18 aa, Artificial Sequence
  Cyclic GFR-binding peptide
  MOD_RES (4), (5): Xaa is C or S
ASPXXVSQDLSSLSILFF

SEQ ID NO: 10937 - protein, 16 aa, Artificial Sequence
  Cyclic GFR-binding peptide
  MOD_RES (1), (1): Xaa is C or S
XQPSRVHHSSLSVLFF

SEQ ID NO: 10938 - protein, 23 aa, Artificial Sequence
  Cyclic GFR-binding peptide
  MOD_RES (6), (7): Xaa is C or S
AVPKAXXAPTKLSSLSVLFFDSS

SEQ ID NO: 10939 - protein, 14 aa, Artificial Sequence
  Cyclic GFR-binding peptide
  MOD_RES (1), (1): Xaa is C or S
XVPTKLSSLSVLFF

SEQ ID NO: 10940 - protein, 15 aa, Artificial Sequence
  Cyclic GFR-binding peptide
SSLSVLFFDDMGVPT

SEQ ID NO: 10941 - protein, 19 aa, Artificial Sequence
  Cyclic GFR-binding peptide
PTKMSSLSMLFFNDKQQII

SEQ ID NO: 10942 - protein, 25 aa, Artificial Sequence
  Cyclic GFR-binding peptide
  MOD_RES (6), (7): Xaa is C or S
YVPKPXXAPTKLSSLSVLFFDDSSN

SEQ ID NO: 10943 - protein, 23 aa, Artificial Sequence
  Cyclic GFR-binding peptide
  MOD_RES (6), (7): Xaa is C or S
RVPSTXXAPVKTSSLSMLFFDNG

SEQ ID NO: 10944 - protein, 17 aa, Artificial Sequence
  Cyclic GFR-binding peptide
  MOD_RES (3), (4): Xaa is C or S
SPXXVSQDLSSLSILFF

SEQ ID NO: 10945 - protein, 15 aa, Artificial Sequence
  Cyclic GFR-binding peptide
  MOD_RES (1), (2): Xaa is C or S
XXVPQALSSLSILFF

SEQ ID NO: 10946 - protein, 16 aa, Artificial Sequence
  Cyclic GFR-binding peptide
LSSLSILFFIGKTPKI

SEQ ID NO: 10947 - protein, 27 aa, Artificial Sequence
  Cyclic GFR-binding peptide
  MOD_RES (6), (7): Xaa is C or S
KVGKAXXVPTKLSSLSVLFFDDMGVPT

SEQ ID NO: 10948 - protein, 27 aa, Artificial Sequence
  Cyclic GFR-binding peptide
  MOD_RES (6), (7): Xaa is C or S
ASASPXXVPQDLSSLSILFFVGRTPKV

SEQ ID NO: 10949 - protein, 15 aa, Artificial Sequence
  Cyclic GFR-binding peptide
SSLSILFFIGKTPKI

SEQ ID NO: 10950 - protein, 18 aa, Artificial Sequence
  Cyclic GFR-binding peptide
  MOD_RES (3), (3): Xaa is C or S
VKXQPSRVHHSSLSVLFF

SEQ ID NO: 10951 - protein, 22 aa, Artificial Sequence
  Cyclic GFR-binding peptide
  MOD_RES (6), (7): Xaa is C or S
KIPKAXXVPTELSSLSMLFFDE

SEQ ID NO: 10952 - protein, 16 aa, Artificial Sequence
  Cyclic GFR-binding peptide
MSSLSMLFFNDKQQII

SEQ ID NO: 10953 - protein, 23 aa, Artificial Sequence
  Cyclic GFR-binding peptide
  MOD_RES (7), (7): Xaa is C or S
NDEGLEXVPTEESSLSMLFFRIK

SEQ ID NO: 10954 - protein, 19 aa, Artificial Sequence
  Cyclic GFR-binding peptide
  MOD_RES (5), (6): Xaa is C or S
SAAPXXVPQALSSLSILFF

SEQ ID NO: 10955 - protein, 27 aa, Artificial Sequence
  Cyclic GFR-binding peptide
  MOD_RES (6), (7): Xaa is C or S
HVPKPXXAPTKLSSLSVLFFDDSSNVI

SEQ ID NO: 10956 - protein, 23 aa, Artificial Sequence
  Cyclic GFR-binding peptide
  MOD_RES (6), (7): Xaa is C or S
ASASPXXVSQDLSSLSILFFIGK

SEQ ID NO: 10957 - protein, 22 aa, Artificial Sequence
  Cyclic GFR-binding peptide
  MOD_RES (6), (7): Xaa is C or S
YVPKPXXAPTKLSSLSVLFFDD

SEQ ID NO: 10958 - protein, 17 aa, Artificial Sequence
  Cyclic GFR-binding peptide
  MOD_RES (3), (4): Xaa is C or S
PTXXVPTRLSSLSILFF

SEQ ID NO: 10959 - protein, 26 aa, Artificial Sequence
  Cyclic GFR-binding peptide
  MOD_RES (6), (7): Xaa is C or S
RVPSTXXAPVKTSSLSMLFFDNGRVL

SEQ ID NO: 10960 - protein, 17 aa, Artificial Sequence
  Cyclic GFR-binding peptide
  MOD_RES (3), (4): Xaa is C or S
STXXAPVKTSSLSMLFF

SEQ ID NO: 10961 - protein, 29 aa, Artificial Sequence
  Cyclic GFR-binding peptide
  MOD_RES (7), (7): Xaa is C or S
NDEGLEXVPTEESSLSMLFFRIKPHQGQH

SEQ ID NO: 10962 - protein, 27 aa, Artificial Sequence
  Cyclic GFR-binding peptide
  MOD_RES (6), (7): Xaa is C or S
AVPKAXXAPTKLSSLSVLFFDSSNNVI

SEQ ID NO: 10963 - protein, 26 aa, Artificial Sequence
  Cyclic GFR-binding peptide
  MOD_RES (5), (5): Xaa is C or S
SSVKXQPSRVHHSSLSVLFFEYVRKK

SEQ ID NO: 10964 - protein, 26 aa, Artificial Sequence
  Cyclic GFR-binding peptide
  MOD_RES (6), (7): Xaa is C or S
STPPTXXVPTRLSSLSILFFDSANNV

SEQ ID NO: 10965 - protein, 21 aa, Artificial Sequence
  Cyclic GFR-binding peptide
  MOD_RES (6), (7): Xaa is C or S
HVPKPXXAPTKLSSLSVLFFD

SEQ ID NO: 10966 - protein, 15 aa, Artificial Sequence
  Cyclic GFR-binding peptide
SSLSILFFDAANNVV

SEQ ID NO: 10967 - protein, 15 aa, Artificial Sequence
  Cyclic GFR-binding peptide
  MOD_RES (1), (2): Xaa is C or S
XXAPTKLSSLSVLFF

SEQ ID NO: 10968 - protein, 17 aa, Artificial Sequence
  Cyclic GFR-binding peptide
DLSSLSILFFVGRTPKV

SEQ ID NO: 10969 - protein, 14 aa, Artificial Sequence
  Cyclic GFR-binding peptide
  MOD_RES (1), (1): Xaa is C or S
XVSQDLSSLSILFF

SEQ ID NO: 10970 - protein, 19 aa, Artificial Sequence
  Cyclic GFR-binding peptide
  MOD_RES (5), (6): Xaa is C or S
APASXXVPARLSSLSILFF

SEQ ID NO: 10971 - protein, 18 aa, Artificial Sequence
  Cyclic GFR-binding peptide
TKMSSLSMLFFNDKQQII

SEQ ID NO: 10972 - protein, 13 aa, Artificial Sequence
  Cyclic GFR-binding peptide
VPTELSSLSMLFF

SEQ ID NO: 10973 - protein, 22 aa, Artificial Sequence
  Cyclic GFR-binding peptide
  MOD_RES (7), (7): Xaa is C or S
NDEGLEXVPTEESSLSMLFFRI

SEQ ID NO: 10974 - protein, 27 aa, Artificial Sequence
  Cyclic GFR-binding peptide
  MOD_RES (6), (7): Xaa is C or S
KIPKAXXVPTELSSLSMLFFDENEKVV

SEQ ID NO: 10975 - protein, 25 aa, Artificial Sequence
  Cyclic GFR-binding peptide
  MOD_RES (6), (7): Xaa is C or S
TVPKPXXAPTQLSSLSVLFFDDSSN

SEQ ID NO: 10976 - protein, 15 aa, Artificial Sequence
  Cyclic GFR-binding peptide
SSLSMLFFDNGRVLL

SEQ ID NO: 10977 - protein, 24 aa, Artificial Sequence
  Cyclic GFR-binding peptide
  MOD_RES (6), (7): Xaa is C or S
SIPKAXXVPTELSSLSMLFFDEYD

SEQ ID NO: 10978 - protein, 18 aa, Artificial Sequence
  Cyclic GFR-binding peptide
  MOD_RES (4), (5): Xaa is C or S
PKPXXAPTKLSSLSVLFF

SEQ ID NO: 10979 - protein, 21 aa, Artificial Sequence
  Cyclic GFR-binding peptide
  MOD_RES (6), (7): Xaa is C or S
AAPASXXVPARLSSLSILFFD

SEQ ID NO: 10980 - protein, 21 aa, Artificial Sequence
  Cyclic GFR-binding peptide
  MOD_RES (6), (7): Xaa is C or S
ASASPXXVSQDLSSLSILFFI

SEQ ID NO: 10981 - protein, 23 aa, Artificial Sequence
  Cyclic GFR-binding peptide
  MOD_RES (6), (7): Xaa is C or S
TVPKPXXAPTQLSSLSVLFFDDS

SEQ ID NO: 10982 - protein, 22 aa, Artificial Sequence
  Cyclic GFR-binding peptide
  MOD_RES (7), (7): Xaa is C or S
HVTKPTXAPTKLSSLSVLFFDD

SEQ ID NO: 10983 - protein, 14 aa, Artificial Sequence
  Cyclic GFR-binding peptide
  MOD_RES (1), (1): Xaa is C or S
XVPARLSSLSILFF

SEQ ID NO: 10984 - protein, 21 aa, Artificial Sequence
  Cyclic GFR-binding peptide
  MOD_RES (6), (7): Xaa is C or S
KASKAXXVPTKLSSLSILFFD

SEQ ID NO: 10985 - protein, 23 aa, Artificial Sequence
  Cyclic GFR-binding peptide
  MOD_RES (6), (7): Xaa is C or S
STPPTXXVPTRLSSLSILFFDSA

SEQ ID NO: 10986 - protein, 26 aa, Artificial Sequence
  Cyclic GFR-binding peptide
  MOD_RES (6), (7): Xaa is C or S
AAPASXXVPARLSSLSILFFDAANNV

SEQ ID NO: 10987 - protein, 19 aa, Artificial Sequence
  Cyclic GFR-binding peptide
  MOD_RES (4), (4): Xaa is C or S
SVKXQPSRVHHSSLSVLFF

SEQ ID NO: 10988 - protein, 19 aa, Artificial Sequence
  Cyclic GFR-binding peptide
  MOD_RES (5), (6): Xaa is C or S
SAGPXXTPTKMSSLSMLFF

SEQ ID NO: 10989 - protein, 17 aa, Artificial Sequence
  Cyclic GFR-binding peptide
RLSSLSILFFDSANNVV

SEQ ID NO: 10990 - protein, 20 aa, Artificial Sequence
  Cyclic GFR-binding peptide
  MOD_RES (6), (7): Xaa is C or S
ASASPXXVPQDLSSLSILFF

SEQ ID NO: 10991 - protein, 17 aa, Artificial Sequence
  Cyclic GFR-binding peptide
  MOD_RES (3), (4): Xaa is C or S
KPXXAPTKLSSLSVLFF

SEQ ID NO: 10992 - protein, 17 aa, Artificial Sequence
  Cyclic GFR-binding peptide
  MOD_RES (3), (4): Xaa is C or S
KAXXVPTKLSSLSILFF

SEQ ID NO: 10993 - protein, 13 aa, Artificial Sequence
  Cyclic GFR-binding peptide
VPQDLSSLSILFF

SEQ ID NO: 10994 - protein, 20 aa, Artificial Sequence
  Cyclic GFR-binding peptide
  MOD_RES (6), (7): Xaa is C or S
AAPASXXVPARLSSLSILFF

SEQ ID NO: 10995 - protein, 15 aa, Artificial Sequence
  Cyclic GFR-binding peptide
SSLSMLFFDEYDKVV

SEQ ID NO: 10996 - protein, 21 aa, Artificial Sequence
  Cyclic GFR-binding peptide
  MOD_RES (6), (7): Xaa is C or S
ASAAPXXVPQALSSLSILFFV

SEQ ID NO: 10997 - protein, 20 aa, Artificial Sequence
  Cyclic GFR-binding peptide
  MOD_RES (7), (7): Xaa is C or S
HVTKPTXAPTKLSSLSVLFF

SEQ ID NO: 10998 - protein, 24 aa, Artificial Sequence
  Cyclic GFR-binding peptide
  MOD_RES (6), (7): Xaa is C or S
STPPTXXVPTRLSSLSILFFDSAN

SEQ ID NO: 10999 - protein, 24 aa, Artificial Sequence
  Cyclic GFR-binding peptide
  MOD_RES (6), (7): Xaa is C or S
ASAAPXXVPQALSSLSILFFVGRK

SEQ ID NO: 11000 - protein, 17 aa, Artificial Sequence
  Cyclic GFR-binding peptide
RLSSLSILFFDAANNVV

SEQ ID NO: 11001 - protein, 15 aa, Artificial Sequence
  Cyclic GFR-binding peptide
SSLSILFFVGRKPKV

SEQ ID NO: 11002 - protein, 15 aa, Artificial Sequence
  Cyclic GFR-binding peptide
SSLSVLFFDDSSNVI

SEQ ID NO: 11003 - protein, 29 aa, Artificial Sequence
  Cyclic GFR-binding peptide
  MOD_RES (5), (5): Xaa is C or S
SSVKXQPSRVHHSSLSVLFFEYVRKKPKL

SEQ ID NO: 11004 - protein, 18 aa, Artificial Sequence
  Cyclic GFR-binding peptide
VKTSSLSMLFFDNGRVLL

SEQ ID NO: 11005 - protein, 20 aa, Artificial Sequence
  Cyclic GFR-binding peptide
  MOD_RES (5), (5): Xaa is C or S
SSVKXQPSRVHHSSLSVLFF

SEQ ID NO: 11006 - protein, 15 aa, Artificial Sequence
  Cyclic GFR-binding peptide
  MOD_RES (1), (2): Xaa is C or S
XXVPQDLSSLSILFF

SEQ ID NO: 11007 - protein, 23 aa, Artificial Sequence
  Cyclic GFR-binding peptide
  MOD_RES (6), (7): Xaa is C or S
ASASPXXVPQDLSSLSILFFVGR

SEQ ID NO: 11008 - protein, 27 aa, Artificial Sequence
  Cyclic GFR-binding peptide
  MOD_RES (6), (7): Xaa is C or S
ASASPXXVSQDLSSLSILFFIGKTPKI

SEQ ID NO: 11009 - protein, 25 aa, Artificial Sequence
  Cyclic GFR-binding peptide
  MOD_RES (6), (7): Xaa is C or S
SIPKAXXVPTELSSLSMLFFDEYDK

SEQ ID NO: 11010 - protein, 16 aa, Artificial Sequence
  Cyclic GFR-binding peptide
LSSLSVLFFDSSNNVI

SEQ ID NO: 11011 - protein, 26 aa, Artificial Sequence
  Cyclic GFR-binding peptide
  MOD_RES (6), (7): Xaa is C or S
TVPKPXXAPTQLSSLSVLFFDDSSNV

SEQ ID NO: 11012 - protein, 26 aa, Artificial Sequence
  Cyclic GFR-binding peptide
  MOD_RES (6), (7): Xaa is C or S
ASASPXXVPQDLSSLSILFFVGRTPK

SEQ ID NO: 11013 - protein, 17 aa, Artificial Sequence
  Cyclic GFR-binding peptide
ALSSLSILFFVGRKPKV

SEQ ID NO: 11014 - protein, 19 aa, Artificial Sequence
  Cyclic GFR-binding peptide
PTKLSSLSVLFFDDSSNVI

SEQ ID NO: 11015 - protein, 18 aa, Artificial Sequence
  Cyclic GFR-binding peptide
TRLSSLSILFFDSANNVV

SEQ ID NO: 11016 - protein, 16 aa, Artificial Sequence
  Cyclic GFR-binding peptide
LSSLSILFFDKGVVTY

SEQ ID NO: 11017 - protein, 21 aa, Artificial Sequence
  Cyclic GFR-binding peptide
  MOD_RES (6), (7): Xaa is C or S
AVPKAXXAPTKLSSLSVLFFD

SEQ ID NO: 11018 - protein, 20 aa, Artificial Sequence
  Cyclic GFR-binding peptide
  MOD_RES (6), (7): Xaa is C or S
STPPTXXVPTRLSSLSILFF

SEQ ID NO: 11019 - protein, 18 aa, Artificial Sequence
  Cyclic GFR-binding peptide
ARLSSLSILFFDAANNVV

SEQ ID NO: 11020 - protein, 25 aa, Artificial Sequence
  Cyclic GFR-binding peptide
  MOD_RES (6), (7): Xaa is C or S
GSAGPXXTPTKMSSLSMLFFNDKQQ

SEQ ID NO: 11021 - protein, 19 aa, Artificial Sequence
  Cyclic GFR-binding peptide
  MOD_RES (5), (6): Xaa is C or S
VGKAXXVPTKLSSLSVLFF

SEQ ID NO: 11022 - protein, 23 aa, Artificial Sequence
  Cyclic GFR-binding peptide
  MOD_RES (6), (7): Xaa is C or S
KIPKAXXVPTELSSLSMLFFDEN

SEQ ID NO: 11023 - protein, 18 aa, Artificial Sequence
  Cyclic GFR-binding peptide
  MOD_RES (5), (5): Xaa is C or S
TKPTXAPTKLSSLSVLFF

SEQ ID NO: 11024 - protein, 25 aa, Artificial Sequence
  Cyclic GFR-binding peptide
  MOD_RES (6), (7): Xaa is C or S
ASAAPXXVPQALSSLSILFFVGRKP

SEQ ID NO: 11025 - protein, 20 aa, Artificial Sequence
  Cyclic GFR-binding peptide
  MOD_RES (7), (7): Xaa is C or S
NDEGLEXVPTEESSLSMLFF

SEQ ID NO: 11026 - protein, 19 aa, Artificial Sequence
  Cyclic GFR-binding peptide
PQDLSSLSILFFVGRTPKV

SEQ ID NO: 11027 - protein, 19 aa, Artificial Sequence
  Cyclic GFR-binding peptide
PTELSSLSMLFFDEYDKVV

SEQ ID NO: 11028 - protein, 17 aa, Artificial Sequence
  Cyclic GFR-binding peptide
  MOD_RES (2), (2): Xaa is C or S
KXQPSRVHHSSLSVLFF

SEQ ID NO: 11029 - protein, 26 aa, Artificial Sequence
  Cyclic GFR-binding peptide
  MOD_RES (6), (7): Xaa is C or S
GSAGPXXTPTKMSSLSMLFFNDKQQI

SEQ ID NO: 11030 - protein, 13 aa, Artificial Sequence
  Cyclic GFR-binding peptide
VPQALSSLSILFF

SEQ ID NO: 11031 - protein, 22 aa, Artificial Sequence
  Cyclic GFR-binding peptide
  MOD_RES (6), (7): Xaa is C or S
TVPKPXXAPTQLSSLSVLFFDD

SEQ ID NO: 11032 - protein, 19 aa, Artificial Sequence
  Cyclic GFR-binding peptide
PTKLSSLSILFFDKGVVTY

SEQ ID NO: 11033 - protein, 25 aa, Artificial Sequence
  Cyclic GFR-binding peptide
  MOD_RES (6), (7): Xaa is C or S
RVPSTXXAPVKTSSLSMLFFDNGRV

SEQ ID NO: 11034 - protein, 19 aa, Artificial Sequence
  Cyclic GFR-binding peptide
PTQLSSLSVLFFDDSSNVI

SEQ ID NO: 11035 - protein, 16 aa, Artificial Sequence
  Cyclic GFR-binding peptide
  MOD_RES (2), (3): Xaa is C or S
PXXVPQDLSSLSILFF

SEQ ID NO: 11036 - protein, 16 aa, Artificial Sequence
  Cyclic GFR-binding peptide
TSSLSMLFFDNGRVLL

SEQ ID NO: 11037 - protein, 15 aa, Artificial Sequence
  Cyclic GFR-binding peptide
SSLSMLFFDENEKVV

SEQ ID NO: 11038 - protein, 17 aa, Artificial Sequence
  Cyclic GFR-binding peptide
SSLSMLFFRIKPHQGQH

SEQ ID NO: 11039 - protein, 15 aa, Artificial Sequence
  Cyclic GFR-binding peptide
  MOD_RES (1), (2): Xaa is C or S
XXVPARLSSLSILFF

SEQ ID NO: 11040 - protein, 22 aa, Artificial Sequence
  Cyclic GFR-binding peptide
  MOD_RES (6), (7): Xaa is C or S
ASAAPXXVPQALSSLSILFFVG

SEQ ID NO: 11041 - protein, 18 aa, Artificial Sequence
  Cyclic GFR-binding peptide
  MOD_RES (4), (5): Xaa is C or S
AGPXXTPTKMSSLSMLFF

SEQ ID NO: 11042 - protein, 19 aa, Artificial Sequence
  Cyclic GFR-binding peptide
PTKLSSLSVLFFDSSNNVI

SEQ ID NO: 11043 - protein, 13 aa, Artificial Sequence
  Cyclic GFR-binding peptide
VPTKLSSLSILFF

SEQ ID NO: 11044 - protein, 26 aa, Artificial Sequence
  Cyclic GFR-binding peptide
  MOD_RES (7), (7): Xaa is C or S
NDEGLEXVPTEESSLSMLFFRIKPHQ

SEQ ID NO: 11045 - protein, 21 aa, Artificial Sequence
  Cyclic GFR-binding peptide
  MOD_RES (6), (7): Xaa is C or S
KIPKAXXVPTELSSLSMLFFD

SEQ ID NO: 11046 - protein, 15 aa, Artificial Sequence
  Cyclic GFR-binding peptide
  MOD_RES (1), (2): Xaa is C or S
XXVPTELSSLSMLFF

SEQ ID NO: 11047 - protein, 25 aa, Artificial Sequence
  Cyclic GFR-binding peptide
  MOD_RES (6), (7): Xaa is C or S
HVPKPXXAPTKLSSLSVLFFDDSSN

SEQ ID NO: 11048 - protein, 18 aa, Artificial Sequence
  Cyclic GFR-binding peptide
QDLSSLSILFFIGKTPKI

SEQ ID NO: 11049 - protein, 16 aa, Artificial Sequence
  Cyclic GFR-binding peptide
  MOD_RES (2), (3): Xaa is C or S
PXXTPTKMSSLSMLFF

SEQ ID NO: 11050 - protein, 16 aa, Artificial Sequence
  Cyclic GFR-binding peptide
LSSLSMLFFDEYDKVV

SEQ ID NO: 11051 - protein, 13 aa, Artificial Sequence
  Cyclic GFR-binding peptide
APTQLSSLSVLFF

SEQ ID NO: 11052 - protein, 18 aa, Artificial Sequence
  Cyclic GFR-binding peptide
  MOD_RES (4), (5): Xaa is C or S
PPTXXVPTRLSSLSILFF

SEQ ID NO: 11053 - protein, 26 aa, Artificial Sequence
  Cyclic GFR-binding peptide
  MOD_RES (6), (7): Xaa is C or S
KVGKAXXVPTKLSSLSVLFFDDMGVP

SEQ ID NO: 11054 - protein, 16 aa, Artificial Sequence
  Cyclic GFR-binding peptide
  MOD_RES (3), (3): Xaa is C or S
PTXAPTKLSSLSVLFF

SEQ ID NO: 11055 - protein, 19 aa, Artificial Sequence
  Cyclic GFR-binding peptide
PTKLSSLSVLFFDDMGVPT

SEQ ID NO: 11056 - protein, 15 aa, Artificial Sequence
  Cyclic GFR-binding peptide
  MOD_RES (1), (2): Xaa is C or S
XXVPTKLSSLSVLFF

SEQ ID NO: 11057 - protein, 20 aa, Artificial Sequence
  Cyclic GFR-binding peptide
  MOD_RES (6), (7): Xaa is C or S
GSAGPXXTPTKMSSLSMLFF

SEQ ID NO: 11058 - protein, 26 aa, Artificial Sequence
  Cyclic GFR-binding peptide
  MOD_RES (6), (7): Xaa is C or S
ASASPXXVSQDLSSLSILFFIGKTPK

SEQ ID NO: 11059 - protein, 22 aa, Artificial Sequence
  Cyclic GFR-binding peptide
  MOD_RES (6), (7): Xaa is C or S
KASKAXXVPTKLSSLSILFFDK

SEQ ID NO: 11060 - protein, 13 aa, Artificial Sequence
  Cyclic GFR-binding peptide
SRVHHSSLSVLFF

SEQ ID NO: 11061 - protein, 18 aa, Artificial Sequence
  Cyclic GFR-binding peptide
  MOD_RES (4), (5): Xaa is C or S
SKAXXVPTKLSSLSILFF

SEQ ID NO: 11062 - protein, 25 aa, Artificial Sequence
  Cyclic GFR-binding peptide
  MOD_RES (5), (5): Xaa is C or S
SSVKXQPSRVHHSSLSVLFFEYVRK

SEQ ID NO: 11063 - protein, 16 aa, Artificial Sequence
  Cyclic GFR-binding peptide
  MOD_RES (2), (3): Xaa is C or S
AXXVPTKLSSLSILFF

SEQ ID NO: 11064 - protein, 17 aa, Artificial Sequence
  Cyclic GFR-binding peptide
  MOD_RES (3), (4): Xaa is C or S
KPXXAPTQLSSLSVLFF

SEQ ID NO: 11065 - protein, 17 aa, Artificial Sequence
  Cyclic GFR-binding peptide
  MOD_RES (3), (4): Xaa is C or S
KAXXAPTKLSSLSVLFF

SEQ ID NO: 11066 - protein, 26 aa, Artificial Sequence
  Cyclic GFR-binding peptide
  MOD_RES (6), (7): Xaa is C or S
AVPKAXXAPTKLSSLSVLFFDSSNNV

SEQ ID NO: 11067 - protein, 23 aa, Artificial Sequence
  Cyclic GFR-binding peptide
  MOD_RES (7), (7): Xaa is C or S
HVTKPTXAPTKLSSLSVLFFDDS

SEQ ID NO: 11068 - protein, 13 aa, Artificial Sequence
  Cyclic GFR-binding peptide
VPTRLSSLSILFF

SEQ ID NO: 11069 - protein, 15 aa, Artificial Sequence
  Cyclic GFR-binding peptide
  MOD_RES (1), (2): Xaa is C or S
XXTPTKMSSLSMLFF

SEQ ID NO: 11070 - protein, 27 aa, Artificial Sequence
  Cyclic GFR-binding peptide
  MOD_RES (6), (7): Xaa is C or S
SIPKAXXVPTELSSLSMLFFDEYDKVV

SEQ ID NO: 11071 - protein, 20 aa, Artificial Sequence
  Cyclic GFR-binding peptide
  MOD_RES (6), (7): Xaa is C or S
KIPKAXXVPTELSSLSMLFF

SEQ ID NO: 11072 - protein, 13 aa, Artificial Sequence
  Cyclic GFR-binding peptide
TPTKMSSLSMLFF

SEQ ID NO: 11073 - protein, 16 aa, Artificial Sequence
  Cyclic GFR-binding peptide
LSSLSVLFFDDSSNVI

SEQ ID NO: 11074 - protein, 14 aa, Artificial Sequence
  Cyclic GFR-binding peptide
  MOD_RES (1), (1): Xaa is C or S
XVPTEESSLSMLFF

SEQ ID NO: 11075 - protein, 17 aa, Artificial Sequence
  Cyclic GFR-binding peptide
  MOD_RES (3), (4): Xaa is C or S
GPXXTPTKMSSLSMLFF

SEQ ID NO: 11076 - protein, 20 aa, Artificial Sequence
  Cyclic GFR-binding peptide
  MOD_RES (6), (7): Xaa is C or S
TVPKPXXAPTQLSSLSVLFF

SEQ ID NO: 11077 - protein, 18 aa, Artificial Sequence
  Cyclic GFR-binding peptide
TELSSLSMLFFDENEKVV

SEQ ID NO: 11078 - protein, 23 aa, Artificial Sequence
  Cyclic GFR-binding peptide
  MOD_RES (5), (5): Xaa is C or S
SSVKXQPSRVHHSSLSVLFFEYV

SEQ ID NO: 11079 - protein, 18 aa, Artificial Sequence
  Cyclic GFR-binding peptide
  MOD_RES (4), (5): Xaa is C or S
ASPXXVPQDLSSLSILFF

SEQ ID NO: 11080 - protein, 17 aa, Artificial Sequence
  Cyclic GFR-binding peptide
KLSSLSILFFDKGVVTY

SEQ ID NO: 11081 - protein, 26 aa, Artificial Sequence
  Cyclic GFR-binding peptide
  MOD_RES (6), (7): Xaa is C or S
HVPKPXXAPTKLSSLSVLFFDDSSNV

SEQ ID NO: 11082 - protein, 21 aa, Artificial Sequence
  Cyclic GFR-binding peptide
  MOD_RES (7), (7): Xaa is C or S
NDEGLEXVPTEESSLSMLFFR

SEQ ID NO: 11083 - protein, 23 aa, Artificial Sequence
  Cyclic GFR-binding peptide
  MOD_RES (6), (7): Xaa is C or S
SIPKAXXVPTELSSLSMLFFDEY

SEQ ID NO: 11084 - protein, 21 aa, Artificial Sequence
  Cyclic GFR-binding peptide
  MOD_RES (6), (7): Xaa is C or S
RVPSTXXAPVKTSSLSMLFFD

SEQ ID NO: 11085 - protein, 24 aa, Artificial Sequence
  Cyclic GFR-binding peptide
  MOD_RES (6), (7): Xaa is C or S
GSAGPXXTPTKMSSLSMLFFNDKQ

SEQ ID NO: 11086 - protein, 20 aa, Artificial Sequence
  Cyclic GFR-binding peptide
  MOD_RES (6), (7): Xaa is C or S
RVPSTXXAPVKTSSLSMLFF

SEQ ID NO: 11087 - protein, 13 aa, Artificial Sequence
  Cyclic GFR-binding peptide
VSQDLSSLSILFF

SEQ ID NO: 11088 - protein, 27 aa, Artificial Sequence
  Cyclic GFR-binding peptide
  MOD_RES (6), (7): Xaa is C or S
STPPTXXVPTRLSSLSILFFDSANNVV

SEQ ID NO: 11089 - protein, 24 aa, Artificial Sequence
  Cyclic GFR-binding peptide
  MOD_RES (6), (7): Xaa is C or S
AAPASXXVPARLSSLSILFFDAAN

SEQ ID NO: 11090 - protein, 17 aa, Artificial Sequence
  Cyclic GFR-binding peptide
  MOD_RES (4), (4): Xaa is C or S
KPTXAPTKLSSLSVLFF

SEQ ID NO: 11091 - protein, 19 aa, Artificial Sequence
  Cyclic GFR-binding peptide
SQDLSSLSILFFIGKTPKI

SEQ ID NO: 11092 - protein, 19 aa, Artificial Sequence
  Cyclic GFR-binding peptide
  MOD_RES (6), (6): Xaa is C or S
VTKPTXAPTKLSSLSVLFF

SEQ ID NO: 11093 - protein, 18 aa, Artificial Sequence
  Cyclic GFR-binding peptide
  MOD_RES (4), (5): Xaa is C or S
PASXXVPARLSSLSILFF

SEQ ID NO: 11094 - protein, 16 aa, Artificial Sequence
  Cyclic GFR-binding peptide
  MOD_RES (2), (3): Xaa is C or S
TXXVPTRLSSLSILFF

SEQ ID NO: 11095 - protein, 18 aa, Artificial Sequence
  Cyclic GFR-binding peptide
  MOD_RES (4), (5): Xaa is C or S
PKAXXVPTELSSLSMLFF

SEQ ID NO: 11096 - protein, 17 aa, Artificial Sequence
  Cyclic GFR-binding peptide
  MOD_RES (3), (4): Xaa is C or S
ASXXVPARLSSLSILFF

SEQ ID NO: 11097 - protein, 23 aa, Artificial Sequence
  Cyclic GFR-binding peptide
  MOD_RES (6), (7): Xaa is C or S
KASKAXXVPTKLSSLSILFFDKG

SEQ ID NO: 11098 - protein, 17 aa, Artificial Sequence
  Cyclic GFR-binding peptide
KLSSLSVLFFDSSNNVI

SEQ ID NO: 11099 - protein, 28 aa, Artificial Sequence
  Cyclic GFR-binding peptide
  MOD_RES (5), (5): Xaa is C or S
SSVKXQPSRVHHSSLSVLFFEYVRKKPK

SEQ ID NO: 11100 - protein, 17 aa, Artificial Sequence
  Cyclic GFR-binding peptide
  MOD_RES (3), (4): Xaa is C or S
APXXVPQALSSLSILFF

SEQ ID NO: 11101 - protein, 23 aa, Artificial Sequence
  Cyclic GFR-binding peptide
  MOD_RES (6), (7): Xaa is C or S
KVGKAXXVPTKLSSLSVLFFDDM

SEQ ID NO: 11102 - protein, 22 aa, Artificial Sequence
  Cyclic GFR-binding peptide
  MOD_RES (6), (7): Xaa is C or S
SIPKAXXVPTELSSLSMLFFDE

SEQ ID NO: 11103 - protein, 21 aa, Artificial Sequence
  Cyclic GFR-binding peptide
  MOD_RES (6), (7): Xaa is C or S
SIPKAXXVPTELSSLSMLFFD

SEQ ID NO: 11104 - protein, 27 aa, Artificial Sequence
  Cyclic GFR-binding peptide
  MOD_RES (6), (7): Xaa is C or S
GSAGPXXTPTKMSSLSMLFFNDKQQII

SEQ ID NO: 11105 - protein, 21 aa, Artificial Sequence
  Cyclic GFR-binding peptide
PTEESSLSMLFFRIKPHQGQH

SEQ ID NO: 11106 - protein, 19 aa, Artificial Sequence
  Cyclic GFR-binding peptide
  MOD_RES (5), (6): Xaa is C or S
IPKAXXVPTELSSLSMLFF

SEQ ID NO: 11107 - protein, 19 aa, Artificial Sequence
  Cyclic GFR-binding peptide
  MOD_RES (5), (6): Xaa is C or S
VPSTXXAPVKTSSLSMLFF

SEQ ID NO: 11108 - protein, 15 aa, Artificial Sequence
  Cyclic GFR-binding peptide
  MOD_RES (1), (2): Xaa is C or S
XXAPTQLSSLSVLFF

SEQ ID NO: 11109 - protein, 27 aa, Artificial Sequence
  Cyclic GFR-binding peptide
  MOD_RES (6), (7): Xaa is C or S
YVPKPXXAPTKLSSLSVLFFDDSSNVI

SEQ ID NO: 11110 - protein, 17 aa, Artificial Sequence
  Cyclic GFR-binding peptide
KTSSLSMLFFDNGRVLL

SEQ ID NO: 11111 - protein, 17 aa, Artificial Sequence
  Cyclic GFR-binding peptide
DLSSLSILFFIGKTPKI

SEQ ID NO: 11112 - protein, 15 aa, Artificial Sequence
  Cyclic GFR-binding peptide
SSLSMLFFNDKQQII

SEQ ID NO: 11113 - protein, 13 aa, Artificial Sequence
  Cyclic GFR-binding peptide
VPARLSSLSILFF

SEQ ID NO: 11114 - protein, 14 aa, Artificial Sequence
  Cyclic GFR-binding peptide
  MOD_RES (1), (1): Xaa is C or S
XVPTRLSSLSILFF

SEQ ID NO: 11115 - protein, 15 aa, Artificial Sequence
  Cyclic GFR-binding peptide
  MOD_RES (1), (2): Xaa is C or S
XXVPTKLSSLSILFF

SEQ ID NO: 11116 - protein, 20 aa, Artificial Sequence
  Cyclic GFR-binding peptide
  MOD_RES (6), (7): Xaa is C or S
KASKAXXVPTKLSSLSILFF

SEQ ID NO: 11117 - protein, 20 aa, Artificial Sequence
  Cyclic GFR-binding peptide
  MOD_RES (6), (7): Xaa is C or S
HVPKPXXAPTKLSSLSVLFF

SEQ ID NO: 11118 - protein, 16 aa, Artificial Sequence
  Cyclic GFR-binding peptide
LSSLSILFFDAANNVV

SEQ ID NO: 11119 - protein, 22 aa, Artificial Sequence
  Cyclic GFR-binding peptide
  MOD_RES (6), (7): Xaa is C or S
AVPKAXXAPTKLSSLSVLFFDS

SEQ ID NO: 11120 - protein, 16 aa, Artificial Sequence
  Cyclic GFR-binding peptide
LSSLSILFFVGRTPKV

SEQ ID NO: 11121 - protein, 25 aa, Artificial Sequence
  Cyclic GFR-binding peptide
  MOD_RES (6), (7): Xaa is C or S
KVGKAXXVPTKLSSLSVLFFDDMGV

SEQ ID NO: 11122 - protein, 21 aa, Artificial Sequence
  Cyclic GFR-binding peptide
  MOD_RES (6), (7): Xaa is C or S
KVGKAXXVPTKLSSLSVLFFD

SEQ ID NO: 11123 - protein, 19 aa, Artificial Sequence
  Cyclic GFR-binding peptide
  MOD_RES (5), (6): Xaa is C or S
SASPXXVSQDLSSLSILFF

SEQ ID NO: 11124 - protein, 16 aa, Artificial Sequence
  Cyclic GFR-binding peptide
  MOD_RES (2), (3): Xaa is C or S
AXXAPTKLSSLSVLFF

SEQ ID NO: 11125 - protein, 24 aa, Artificial Sequence
  Cyclic GFR-binding peptide
  MOD_RES (6), (7): Xaa is C or S
KIPKAXXVPTELSSLSMLFFDENE

SEQ ID NO: 11126 - protein, 25 aa, Artificial Sequence
  Cyclic GFR-binding peptide
  MOD_RES (6), (7): Xaa is C or S
ASASPXXVPQDLSSLSILFFVGRTP

SEQ ID NO: 11127 - protein, 22 aa, Artificial Sequence
  Cyclic GFR-binding peptide
  MOD_RES (6), (7): Xaa is C or S
RVPSTXXAPVKTSSLSMLFFDN

SEQ ID NO: 11128 - protein, 23 aa, Artificial Sequence
  Cyclic GFR-binding peptide
  MOD_RES (6), (7): Xaa is C or S
ASAAPXXVPQALSSLSILFFVGR

SEQ ID NO: 11129 - protein, 16 aa, Artificial Sequence
  Cyclic GFR-binding peptide
LSSLSMLFFDENEKVV

SEQ ID NO: 11130 - protein, 18 aa, Artificial Sequence
  Cyclic GFR-binding peptide
HSSLSVLFFEYVRKKPKL

SEQ ID NO: 11131 - protein, 26 aa, Artificial Sequence
  Cyclic GFR-binding peptide
  MOD_RES (6), (7): Xaa is C or S
KIPKAXXVPTELSSLSMLFFDENEKV

SEQ ID NO: 11132 - protein, 19 aa, Artificial Sequence
  Cyclic GFR-binding peptide
  MOD_RES (5), (6): Xaa is C or S
VPKPXXAPTKLSSLSVLFF

SEQ ID NO: 11133 - protein, 17 aa, Artificial Sequence
  Cyclic GFR-binding peptide
  MOD_RES (3), (4): Xaa is C or S
KAXXVPTKLSSLSVLFF

SEQ ID NO: 11134 - protein, 19 aa, Artificial Sequence
  Cyclic GFR-binding peptide
  MOD_RES (6), (6): Xaa is C or S
DEGLEXVPTEESSLSMLFF

SEQ ID NO: 11135 - protein, 14 aa, Artificial Sequence
  Cyclic GFR-binding peptide
  MOD_RES (1), (1): Xaa is C or S
XAPTKLSSLSVLFF

SEQ ID NO: 11136 - protein, 17 aa, Artificial Sequence
  Cyclic GFR-binding peptide
ELSSLSMLFFDENEKVV

SEQ ID NO: 11137 - protein, 27 aa, Artificial Sequence
  Cyclic GFR-binding peptide
  MOD_RES (6), (7): Xaa is C or S
KASKAXXVPTKLSSLSILFFDKGVVTY

SEQ ID NO: 11138 - protein, 24 aa, Artificial Sequence
  Cyclic GFR-binding peptide
  MOD_RES (6), (7): Xaa is C or S
ASASPXXVSQDLSSLSILFFIGKT

SEQ ID NO: 11139 - protein, 18 aa, Artificial Sequence
  Cyclic GFR-binding peptide
  MOD_RES (4), (5): Xaa is C or S
GKAXXVPTKLSSLSVLFF

SEQ ID NO: 11140 - protein, 27 aa, Artificial Sequence
  Cyclic GFR-binding peptide
  MOD_RES (6), (7): Xaa is C or S
ASAAPXXVPQALSSLSILFFVGRKPKV

SEQ ID NO: 11141 - protein, 20 aa, Artificial Sequence
  Cyclic GFR-binding peptide
  MOD_RES (6), (7): Xaa is C or S
ASASPXXVSQDLSSLSILFF

SEQ ID NO: 11142 - protein, 24 aa, Artificial Sequence
  Cyclic GFR-binding peptide
  MOD_RES (6), (7): Xaa is C or S
HVPKPXXAPTKLSSLSVLFFDDSS

SEQ ID NO: 11143 - protein, 18 aa, Artificial Sequence
  Cyclic GFR-binding peptide
TKLSSLSVLFFDDMGVPT

SEQ ID NO: 11144 - protein, 26 aa, Artificial Sequence
  Cyclic GFR-binding peptide
  MOD_RES (6), (7): Xaa is C or S
ASAAPXXVPQALSSLSILFFVGRKPK

SEQ ID NO: 11145 - protein, 16 aa, Artificial Sequence
  Cyclic GFR-binding peptide
LSSLSILFFDSANNVV

SEQ ID NO: 11146 - protein, 13 aa, Artificial Sequence
  Cyclic GFR-binding peptide
VPTEESSLSMLFF

SEQ ID NO: 11147 - protein, 18 aa, Artificial Sequence
  Cyclic GFR-binding peptide
QALSSLSILFFVGRKPKV

SEQ ID NO: 11148 - protein, 22 aa, Artificial Sequence
  Cyclic GFR-binding peptide
  MOD_RES (6), (7): Xaa is C or S
HVPKPXXAPTKLSSLSVLFFDD

SEQ ID NO: 11149 - protein, 25 aa, Artificial Sequence
  Cyclic GFR-binding peptide
  MOD_RES (7), (7): Xaa is C or S
NDEGLEXVPTEESSLSMLFFRIKPH

SEQ ID NO: 11150 - protein, 17 aa, Artificial Sequence
  Cyclic GFR-binding peptide
  MOD_RES (3), (4): Xaa is C or S
KAXXVPTELSSLSMLFF

SEQ ID NO: 11151 - protein, 21 aa, Artificial Sequence
  Cyclic GFR-binding peptide
  MOD_RES (7), (7): Xaa is C or S
HVTKPTXAPTKLSSLSVLFFD

SEQ ID NO: 11152 - protein, 16 aa, Artificial Sequence
  Cyclic GFR-binding peptide
LSSLSVLFFDDMGVPT

SEQ ID NO: 11153 - protein, 16 aa, Artificial Sequence
  Cyclic GFR-binding peptide
  MOD_RES (2), (3): Xaa is C or S
PXXVPQALSSLSILFF

SEQ ID NO: 11154 - protein, 20 aa, Artificial Sequence
  Cyclic GFR-binding peptide
  MOD_RES (6), (7): Xaa is C or S
AVPKAXXAPTKLSSLSVLFF

SEQ ID NO: 11155 - protein, 19 aa, Artificial Sequence
  Cyclic GFR-binding peptide
  MOD_RES (5), (6): Xaa is C or S
TPPTXXVPTRLSSLSILFF

SEQ ID NO: 11156 - protein, 21 aa, Artificial Sequence
  Cyclic GFR-binding peptide
  MOD_RES (5), (5): Xaa is C or S
SSVKXQPSRVHHSSLSVLFFE

SEQ ID NO: 11157 - protein, 19 aa, Artificial Sequence
  Cyclic GFR-binding peptide
  MOD_RES (5), (6): Xaa is C or S
ASKAXXVPTKLSSLSILFF

SEQ ID NO: 11158 - protein, 15 aa, Artificial Sequence
  Cyclic GFR-binding peptide
SSLSVLFFDSSNNVI

SEQ ID NO: 11159 - protein, 25 aa, Artificial Sequence
  Cyclic GFR-binding peptide
  MOD_RES (6), (7): Xaa is C or S
KIPKAXXVPTELSSLSMLFFDENEK

SEQ ID NO: 11160 - protein, 15 aa, Artificial Sequence
  Cyclic GFR-binding peptide
  MOD_RES (2), (2): Xaa is C or S
EXVPTEESSLSMLFF

SEQ ID NO: 11161 - protein, 21 aa, Artificial Sequence
  Cyclic GFR-binding peptide
  MOD_RES (6), (7): Xaa is C or S
ASASPXXVPQDLSSLSILFFV

SEQ ID NO: 11162 - protein, 21 aa, Artificial Sequence
  Cyclic GFR-binding peptide
  MOD_RES (6), (7): Xaa is C or S
TVPKPXXAPTQLSSLSVLFFD

SEQ ID NO: 11163 - protein, 21 aa, Artificial Sequence
  Cyclic GFR-binding peptide
  MOD_RES (6), (7): Xaa is C or S
GSAGPXXTPTKMSSLSMLFFN

SEQ ID NO: 11164 - protein, 26 aa, Artificial Sequence
  Cyclic GFR-binding peptide
  MOD_RES (6), (7): Xaa is C or S
SIPKAXXVPTELSSLSMLFFDEYDKV

SEQ ID NO: 11165 - protein, 14 aa, Artificial Sequence
  Cyclic GFR-binding peptide
  MOD_RES (1), (1): Xaa is C or S
XAPVKTSSLSMLFF

SEQ ID NO: 11166 - protein, 17 aa, Artificial Sequence
  Cyclic GFR-binding peptide
  MOD_RES (3), (4): Xaa is C or S
SPXXVPQDLSSLSILFF

SEQ ID NO: 11167 - protein, 15 aa, Artificial Sequence
  Cyclic GFR-binding peptide
  MOD_RES (14), (15): Xaa is C or S
VKAIKVSRLDQSVXX

SEQ ID NO: 11168 - protein, 22 aa, Artificial Sequence
  Cyclic GFR-binding peptide
  MOD_RES (18), (18): Xaa is C or S
YEYYVVPLPEHHVRSPQXKVSS

SEQ ID NO: 11169 - protein, 20 aa, Artificial Sequence
  Cyclic GFR-binding peptide
  MOD_RES (14), (15): Xaa is C or S
VKAVKVSRLKTPAXXPKPVY

SEQ ID NO: 11170 - protein, 28 aa, Artificial Sequence
  Cyclic GFR-binding peptide
  MOD_RES (24), (24): Xaa is C or S
IPKKRVIEYYVVPLPELQVQTPRXQVNR

SEQ ID NO: 11171 - protein, 23 aa, Artificial Sequence
  Cyclic GFR-binding peptide
  MOD_RES (17), (18): Xaa is C or S
RGVIKRIQVPRLAQPVXXPAASA

SEQ ID NO: 11172 - protein, 19 aa, Artificial Sequence
  Cyclic GFR-binding peptide
  MOD_RES (14), (15): Xaa is C or S
VKAVKVSRLQTPAXXPKPV

SEQ ID NO: 11173 - protein, 26 aa, Artificial Sequence
  Cyclic GFR-binding peptide
  MOD_RES (20), (20): Xaa is C or S
QHPKIRYYLMTLPEEETPVXELGEDN

SEQ ID NO: 11174 - protein, 16 aa, Artificial Sequence
  Cyclic GFR-binding peptide
VVKENEDVKAMKVSRL

SEQ ID NO: 11175 - protein, 21 aa, Artificial Sequence
  Cyclic GFR-binding peptide
  MOD_RES (15), (16): Xaa is C or S
DMIQMTINSLETPVXXAKPIK

SEQ ID NO: 11176 - protein, 18 aa, Artificial Sequence
  Cyclic GFR-binding peptide
IKPTKGIVKAIKVSRLDQ

SEQ ID NO: 11177 - protein, 17 aa, Artificial Sequence
  Cyclic GFR-binding peptide
  MOD_RES (14), (15): Xaa is C or S
IKRIQVPRLAQPVXXPA

SEQ ID NO: 11178 - protein, 18 aa, Artificial Sequence
  Cyclic GFR-binding peptide
VVKDYEDMIQMTINSLET

SEQ ID NO: 11179 - protein, 22 aa, Artificial Sequence
  Cyclic GFR-binding peptide
  MOD_RES (16), (17): Xaa is C or S
EDMIQMTINSLETPVXXAKPIS

SEQ ID NO: 11180 - protein, 14 aa, Artificial Sequence
  Cyclic GFR-binding peptide
  MOD_RES (14), (14): Xaa is C or S
MIQMTINSLETPVX

SEQ ID NO: 11181 - protein, 13 aa, Artificial Sequence
  Cyclic GFR-binding peptide
VKAIKVSRLDQSV

SEQ ID NO: 11182 - protein, 24 aa, Artificial Sequence
  Cyclic GFR-binding peptide
  MOD_RES (18), (19): Xaa is C or S
ENEDVKAMKVSRLETPVXXAKPIK

SEQ ID NO: 11183 - protein, 27 aa, Artificial Sequence
  Cyclic GFR-binding peptide
  MOD_RES (21), (22): Xaa is C or S
VKPKRGVIKRIQVPRLAQPVXXPAASA

SEQ ID NO: 11184 - protein, 15 aa, Artificial Sequence
  Cyclic GFR-binding peptide
VKPKRGVIKRIQVPR

SEQ ID NO: 11185 - protein, 14 aa, Artificial Sequence
  Cyclic GFR-binding peptide
  MOD_RES (14), (14): Xaa is C or S
MIQITINSLDQPVX

SEQ ID NO: 11186 - protein, 22 aa, Artificial Sequence
  Cyclic GFR-binding peptide
  MOD_RES (16), (17): Xaa is C or S
GIMIQITINSLDQSVXXPSASA

SEQ ID NO: 11187 - protein, 23 aa, Artificial Sequence
  Cyclic GFR-binding peptide
  MOD_RES (17), (18): Xaa is C or S
YEDMIQMTINSLETPVXXAKPIS

SEQ ID NO: 11188 - protein, 14 aa, Artificial Sequence
  Cyclic GFR-binding peptide
  MOD_RES (14), (14): Xaa is C or S
YYLMTLPEEETPVX

SEQ ID NO: 11189 - protein, 18 aa, Artificial Sequence
  Cyclic GFR-binding peptide
  MOD_RES (14), (14): Xaa is C or S
IKRVQVPRLKTPAXTPKT

SEQ ID NO: 11190 - protein, 17 aa, Artificial Sequence
  Cyclic GFR-binding peptide
VVKENEDMIQMTINSLE

SEQ ID NO: 11191 - protein, 14 aa, Artificial Sequence
  Cyclic GFR-binding peptide
  MOD_RES (14), (14): Xaa is C or S
IKRMQVPRLETPVX

SEQ ID NO: 11192 - protein, 16 aa, Artificial Sequence
  Cyclic GFR-binding peptide
VVKENEDMIQMTINSL

SEQ ID NO: 11193 - protein, 17 aa, Artificial Sequence
  Cyclic GFR-binding peptide
  MOD_RES (14), (15): Xaa is C or S
IKRVQVPRLQTPAXXPK

SEQ ID NO: 11194 - protein, 22 aa, Artificial Sequence
  Cyclic GFR-binding peptide
  MOD_RES (16), (16): Xaa is C or S
DDIKRVQVPRLKTPAXTPKTVH

SEQ ID NO: 11195 - protein, 18 aa, Artificial Sequence
  Cyclic GFR-binding peptide
IKPTKGIMIQITINSLDQ

SEQ ID NO: 11196 - protein, 25 aa, Artificial Sequence
  Cyclic GFR-binding peptide
  MOD_RES (19), (19): Xaa is C or S
NSSDDVKAVKVSRLKTPAXTPKTVH

SEQ ID NO: 11197 - protein, 17 aa, Artificial Sequence
  Cyclic GFR-binding peptide
  MOD_RES (14), (15): Xaa is C or S
MIQITINSLAQPVXXPA

SEQ ID NO: 11198 - protein, 18 aa, Artificial Sequence
  Cyclic GFR-binding peptide
VVKDYEDVKAMKVSRLET

SEQ ID NO: 11199 - protein, 22 aa, Artificial Sequence
  Cyclic GFR-binding peptide
  MOD_RES (16), (17): Xaa is C or S
EDIKRMQVPRLETPVXXAKPIK

SEQ ID NO: 11200 - protein, 18 aa, Artificial Sequence
  Cyclic GFR-binding peptide
  MOD_RES (14), (15): Xaa is C or S
MIQMTINSLETPVXXAKP

SEQ ID NO: 11201 - protein, 23 aa, Artificial Sequence
  Cyclic GFR-binding peptide
  MOD_RES (19), (19): Xaa is C or S
VYEYYLVTLPEHHVRSPQXKVSS

SEQ ID NO: 11202 - protein, 17 aa, Artificial Sequence
  Cyclic GFR-binding peptide
  MOD_RES (14), (15): Xaa is C or S
VKAIKVSRLDQSVXXPS

SEQ ID NO: 11203 - protein, 21 aa, Artificial Sequence
  Cyclic GFR-binding peptide
  MOD_RES (15), (15): Xaa is C or S
DIKRVQVPRLKTPAXTPKTVH

SEQ ID NO: 11204 - protein, 25 aa, Artificial Sequence
  Cyclic GFR-binding peptide
  MOD_RES (19), (20): Xaa is C or S
KDYEDIKRMQVPRLETPVXXAKPIS

SEQ ID NO: 11205 - protein, 27 aa, Artificial Sequence
  Cyclic GFR-binding peptide
  MOD_RES (21), (22): Xaa is C or S
IKPTKGIVKAIKVSRLDQSVXXPSASA

SEQ ID NO: 11206 - protein, 19 aa, Artificial Sequence
  Cyclic GFR-binding peptide
VVKDYEDVKAMKVSRLETP

SEQ ID NO: 11207 - protein, 13 aa, Artificial Sequence
  Cyclic GFR-binding peptide
IKRMQVPRLETPV

SEQ ID NO: 11208 - protein, 21 aa, Artificial Sequence
  Cyclic GFR-binding peptide
  MOD_RES (15), (16): Xaa is C or S
IVKAIKVSRLDQSVXXPSASA

SEQ ID NO: 11209 - protein, 25 aa, Artificial Sequence
  Cyclic GFR-binding peptide
  MOD_RES (19), (20): Xaa is C or S
KDYEDMIQMTINSLETPVXXAKPIS

SEQ ID NO: 11210 - protein, 19 aa, Artificial Sequence
  Cyclic GFR-binding peptide
  MOD_RES (14), (15): Xaa is C or S
VKAIKVSRLDQSVXXPSAS

SEQ ID NO: 11211 - protein, 24 aa, Artificial Sequence
  Cyclic GFR-binding peptide
  MOD_RES (18), (19): Xaa is C or S
TRGVVKAIKVSRLDQPVXXPSASA

SEQ ID NO: 11212 - protein, 19 aa, Artificial Sequence
  Cyclic GFR-binding peptide
FIPKKRVIEYYLVTLPELQ

SEQ ID NO: 11213 - protein, 14 aa, Artificial Sequence
  Cyclic GFR-binding peptide
  MOD_RES (14), (14): Xaa is C or S
YYVMPLPEEETPVX

SEQ ID NO: 11214 - protein, 19 aa, Artificial Sequence
  Cyclic GFR-binding peptide
  MOD_RES (14), (15): Xaa is C or S
VKAMKVSRLETPVXXAKPI

SEQ ID NO: 11215 - protein, 26 aa, Artificial Sequence
  Cyclic GFR-binding peptide
  MOD_RES (20), (20): Xaa is C or S
VNSSDDVKAVKVSRLKTPAXTPKTVH

SEQ ID NO: 11216 - protein, 24 aa, Artificial Sequence
  Cyclic GFR-binding peptide
  MOD_RES (18), (19): Xaa is C or S
ENEDMIQMTINSLETPVXXAKPIK

SEQ ID NO: 11217 - protein, 28 aa, Artificial Sequence
  Cyclic GFR-binding peptide
  MOD_RES (22), (22): Xaa is C or S
QGQHPKIRYYVMPLPEEETPVXELGEDN

SEQ ID NO: 11218 - protein, 27 aa, Artificial Sequence
  Cyclic GFR-binding peptide
  MOD_RES (23), (23): Xaa is C or S
PKKRVIEYYVVPLPELQVQTPRXQVNR

SEQ ID NO: 11219 - protein, 17 aa, Artificial Sequence
  Cyclic GFR-binding peptide
IVNSSDDIKRVQVPRLK

SEQ ID NO: 11220 - protein, 14 aa, Artificial Sequence
  Cyclic GFR-binding peptide
  MOD_RES (14), (14): Xaa is C or S
VKAIKVSRLAQPVX

SEQ ID NO: 11221 - protein, 16 aa, Artificial Sequence
  Cyclic GFR-binding peptide
IVNSSDDIKRVQVPRL

SEQ ID NO: 11222 - protein, 15 aa, Artificial Sequence
  Cyclic GFR-binding peptide
  MOD_RES (14), (15): Xaa is C or S
IKRMQVPRLETPVXX

SEQ ID NO: 11223 - protein, 27 aa, Artificial Sequence
  Cyclic GFR-binding peptide
  MOD_RES (21), (22): Xaa is C or S
IKPTKGIMIQITINSLDQSVXXPSASA

SEQ ID NO: 11224 - protein, 26 aa, Artificial Sequence
  Cyclic GFR-binding peptide
  MOD_RES (20), (20): Xaa is C or S
VNSSDDIKRVQVPRLKTPAXTPKTVH

SEQ ID NO: 11225 - protein, 14 aa, Artificial Sequence
  Cyclic GFR-binding peptide
  MOD_RES (14), (14): Xaa is C or S
IKRIQVPRLDQSVX

SEQ ID NO: 11226 - protein, 15 aa, Artificial Sequence
  Cyclic GFR-binding peptide
  MOD_RES (14), (14): Xaa is C or S
YYLMTLPEEETPVXE

SEQ ID NO: 11227 - protein, 16 aa, Artificial Sequence
  Cyclic GFR-binding peptide
  MOD_RES (14), (15): Xaa is C or S
VKAMKVSRLETPVXXA

SEQ ID NO: 11228 - protein, 17 aa, Artificial Sequence
  Cyclic GFR-binding peptide
IVNSSDDIKRVQVPRLQ

SEQ ID NO: 11229 - protein, 21 aa, Artificial Sequence
  Cyclic GFR-binding peptide
  MOD_RES (15), (16): Xaa is C or S
VMIQITINSLAQPVXXPAASA

SEQ ID NO: 11230 - protein, 13 aa, Artificial Sequence
  Cyclic GFR-binding peptide
VKAVKVSRLQTPA

SEQ ID NO: 11231 - protein, 23 aa, Artificial Sequence
  Cyclic GFR-binding peptide
  MOD_RES (17), (18): Xaa is C or S
YEDVKAMKVSRLETPVXXAKPIS

SEQ ID NO: 11232 - protein, 19 aa, Artificial Sequence
  Cyclic GFR-binding peptide
VVKDYEDMIQMTINSLETP

SEQ ID NO: 11233 - protein, 15 aa, Artificial Sequence
  Cyclic GFR-binding peptide
  MOD_RES (14), (15): Xaa is C or S
VKAVKVSRLQTPAXX

SEQ ID NO: 11234 - protein, 25 aa, Artificial Sequence
  Cyclic GFR-binding peptide
  MOD_RES (19), (19): Xaa is C or S
NSSDDMIQVTINSLKTPAXTPKTVH

SEQ ID NO: 11235 - protein, 23 aa, Artificial Sequence
  Cyclic GFR-binding peptide
  MOD_RES (19), (19): Xaa is C or S
VYEYYVVPLPEHHVRSPQXKVSS

SEQ ID NO: 11236 - protein, 17 aa, Artificial Sequence
  Cyclic GFR-binding peptide
  MOD_RES (14), (15): Xaa is C or S
MIQITINSLDQPVXXPS

SEQ ID NO: 11237 - protein, 24 aa, Artificial Sequence
  Cyclic GFR-binding peptide
  MOD_RES (18), (19): Xaa is C or S
TRGVMIQITINSLDQPVXXPSASA

SEQ ID NO: 11238 - protein, 21 aa, Artificial Sequence
  Cyclic GFR-binding peptide
  MOD_RES (15), (16): Xaa is C or S
DIKRMQVPRLETPVXXAKPIK

SEQ ID NO: 11239 - protein, 13 aa, Artificial Sequence
  Cyclic GFR-binding peptide
IKRIQVPRLDQPV

SEQ ID NO: 11240 - protein, 15 aa, Artificial Sequence
  Cyclic GFR-binding peptide
  MOD_RES (14), (15): Xaa is C or S
IKRIQVPRLDQPVXX

SEQ ID NO: 11241 - protein, 15 aa, Artificial Sequence
  Cyclic GFR-binding peptide
  MOD_RES (14), (15): Xaa is C or S
MIQMTINSLETPVXX

SEQ ID NO: 11242 - protein, 17 aa, Artificial Sequence
  Cyclic GFR-binding peptide
VKPTRGVIKRIQVPRLD

SEQ ID NO: 11243 - protein, 13 aa, Artificial Sequence
  Cyclic GFR-binding peptide
YYLMTLPEEETPV

SEQ ID NO: 11244 - protein, 18 aa, Artificial Sequence
  Cyclic GFR-binding peptide
VKPKRGVMIQITINSLAQ

SEQ ID NO: 11245 - protein, 16 aa, Artificial Sequence
  Cyclic GFR-binding peptide
IKPTKGIIKRIQVPRL

SEQ ID NO: 11246 - protein, 22 aa, Artificial Sequence
  Cyclic GFR-binding peptide
  MOD_RES (18), (18): Xaa is C or S
YEYYLVTLPEHHVRSPQXKVSS

SEQ ID NO: 11247 - protein, 15 aa, Artificial Sequence
  Cyclic GFR-binding peptide
VKPTRGVIKRIQVPR

SEQ ID NO: 11248 - protein, 17 aa, Artificial Sequence
  Cyclic GFR-binding peptide
  MOD_RES (14), (15): Xaa is C or S
VKAVKVSRLQTPAXXPK

SEQ ID NO: 11249 - protein, 15 aa, Artificial Sequence
  Cyclic GFR-binding peptide
  MOD_RES (14), (15): Xaa is C or S
VKAIKVSRLDQPVXX

SEQ ID NO: 11250 - protein, 19 aa, Artificial Sequence
  Cyclic GFR-binding peptide
  MOD_RES (14), (15): Xaa is C or S
IKRMQVPRLETPVXXAKPI

SEQ ID NO: 11251 - protein, 26 aa, Artificial Sequence
  Cyclic GFR-binding peptide
  MOD_RES (20), (21): Xaa is C or S
VKDYEDVKAMKVSRLETPVXXAKPIS

SEQ ID NO: 11252 - protein, 18 aa, Artificial Sequence
  Cyclic GFR-binding peptide
LKPKKRVYEYYLVTLPEH

SEQ ID NO: 11253 - protein, 18 aa, Artificial Sequence
  Cyclic GFR-binding peptide
VKPKRGVVKAIKVSRLAQ

SEQ ID NO: 11254 - protein, 18 aa, Artificial Sequence
  Cyclic GFR-binding peptide
  MOD_RES (14), (14): Xaa is C or S
VKAVKVSRLKTPAXTPKT

SEQ ID NO: 11255 - protein, 17 aa, Artificial Sequence
  Cyclic GFR-binding peptide
  MOD_RES (14), (15): Xaa is C or S
IKRIQVPRLDQSVXXPS

SEQ ID NO: 11256 - protein, 26 aa, Artificial Sequence
  Cyclic GFR-binding peptide
  MOD_RES (20), (21): Xaa is C or S
KPTKGIMIQITINSLDQSVXXPSASA

SEQ ID NO: 11257 - protein, 19 aa, Artificial Sequence
  Cyclic GFR-binding peptide
  MOD_RES (14), (15): Xaa is C or S
IKRIQVPRLDQPVXXPSAS

SEQ ID NO: 11258 - protein, 16 aa, Artificial Sequence
  Cyclic GFR-binding peptide
  MOD_RES (14), (14): Xaa is C or S
VKAVKVSRLKTPAXTP

SEQ ID NO: 11259 - protein, 22 aa, Artificial Sequence
  Cyclic GFR-binding peptide
  MOD_RES (16), (17): Xaa is C or S
GVIKRIQVPRLAQPVXXPAASA

SEQ ID NO: 11260 - protein, 21 aa, Artificial Sequence
  Cyclic GFR-binding peptide
  MOD_RES (15), (16): Xaa is C or S
VIKRIQVPRLAQPVXXPAASA

SEQ ID NO: 11261 - protein, 15 aa, Artificial Sequence
  Cyclic GFR-binding peptide
VVKENEDVKAMKVSR

SEQ ID NO: 11262 - protein, 17 aa, Artificial Sequence
  Cyclic GFR-binding peptide
  MOD_RES (14), (14): Xaa is C or S
YYLMTLPEEETPVXELG

SEQ ID NO: 11263 - protein, 16 aa, Artificial Sequence
  Cyclic GFR-binding peptide
  MOD_RES (14), (15): Xaa is C or S
IKRVQVPRLKTPAXXP

SEQ ID NO: 11264 - protein, 13 aa, Artificial Sequence
  Cyclic GFR-binding peptide
VKAIKVSRLDQPV

SEQ ID NO: 11265 - protein, 22 aa, Artificial Sequence
  Cyclic GFR-binding peptide
  MOD_RES (16), (17): Xaa is C or S
GVMIQITINSLAQPVXXPAASA

SEQ ID NO: 11266 - protein, 15 aa, Artificial Sequence
  Cyclic GFR-binding peptide
VVKDYEDVKAMKVSR

SEQ ID NO: 11267 - protein, 18 aa, Artificial Sequence
  Cyclic GFR-binding peptide
LKPKKRVYEYYVVPLPEH

SEQ ID NO: 11268 - protein, 15 aa, Artificial Sequence
  Cyclic GFR-binding peptide
IVNSSDDIKRVQVPR

SEQ ID NO: 11269 - protein, 26 aa, Artificial Sequence
  Cyclic GFR-binding peptide
  MOD_RES (20), (21): Xaa is C or S
KPTRGVMIQITINSLDQPVXXPSASA

SEQ ID NO: 11270 - protein, 16 aa, Artificial Sequence
  Cyclic GFR-binding peptide
  MOD_RES (14), (15): Xaa is C or S
VKAVKVSRLKTPAXXP

SEQ ID NO: 11271 - protein, 23 aa, Artificial Sequence
  Cyclic GFR-binding peptide
  MOD_RES (17), (18): Xaa is C or S
SDDVKAVKVSRLKTPAXXPKPVY

SEQ ID NO: 11272 - protein, 17 aa, Artificial Sequence
  Cyclic GFR-binding peptide
  MOD_RES (14), (15): Xaa is C or S
MIQITINSLDQSVXXPS

SEQ ID NO: 11273 - protein, 16 aa, Artificial Sequence
  Cyclic GFR-binding peptide
  MOD_RES (14), (14): Xaa is C or S
IKRVQVPRLKTPAXTP

SEQ ID NO: 11274 - protein, 18 aa, Artificial Sequence
  Cyclic GFR-binding peptide
VKPTRGVVKAIKVSRLDQ

SEQ ID NO: 11275 - protein, 25 aa, Artificial Sequence
  Cyclic GFR-binding peptide
  MOD_RES (19), (20): Xaa is C or S
KDYEDVKAMKVSRLETPVXXAKPIS

SEQ ID NO: 11276 - protein, 15 aa, Artificial Sequence
  Cyclic GFR-binding peptide
  MOD_RES (14), (15): Xaa is C or S
VKAIKVSRLAQPVXX

SEQ ID NO: 11277 - protein, 13 aa, Artificial Sequence
  Cyclic GFR-binding peptide
MIQMTINSLETPV

SEQ ID NO: 11278 - protein, 29 aa, Artificial Sequence
  Cyclic GFR-binding peptide
  MOD_RES (25), (25): Xaa is C or S
FIPKKRVIEYYVVPLPELQVQTPRXQVNR

SEQ ID NO: 11279 - protein, 26 aa, Artificial Sequence
  Cyclic GFR-binding peptide
  MOD_RES (20), (21): Xaa is C or S
VNSSDDVKAVKVSRLKTPAXXPKPVY

SEQ ID NO: 11280 - protein, 15 aa, Artificial Sequence
  Cyclic GFR-binding peptide
  MOD_RES (14), (15): Xaa is C or S
IKRIQVPRLDQSVXX

SEQ ID NO: 11281 - protein, 20 aa, Artificial Sequence
  Cyclic GFR-binding peptide
  MOD_RES (14), (15): Xaa is C or S
IKRVQVPRLKTPAXXPKPVY

SEQ ID NO: 11282 - protein, 22 aa, Artificial Sequence
  Cyclic GFR-binding peptide
  MOD_RES (16), (16): Xaa is C or S
DDMIQVTINSLKTPAXTPKTVH

SEQ ID NO: 11283 - protein, 24 aa, Artificial Sequence
  Cyclic GFR-binding peptide
  MOD_RES (18), (18): Xaa is C or S
SSDDIKRVQVPRLKTPAXTPKTVH

SEQ ID NO: 11284 - protein, 26 aa, Artificial Sequence
  Cyclic GFR-binding peptide
  MOD_RES (20), (21): Xaa is C or S
VNSSDDIKRVQVPRLKTPAXXPKPVY

SEQ ID NO: 11285 - protein, 15 aa, Artificial Sequence
  Cyclic GFR-binding peptide
VVKDYEDMIQMTINS

SEQ ID NO: 11286 - protein, 14 aa, Artificial Sequence
  Cyclic GFR-binding peptide
  MOD_RES (14), (14): Xaa is C or S
VKAIKVSRLDQSVX

SEQ ID NO: 11287 - protein, 27 aa, Artificial Sequence
  Cyclic GFR-binding peptide
  MOD_RES (21), (22): Xaa is C or S
IVNSSDDIKRVQVPRLKTPAXXPKPVY

SEQ ID NO: 11288 - protein, 26 aa, Artificial Sequence
  Cyclic GFR-binding peptide
  MOD_RES (22), (22): Xaa is C or S
KKRVIEYYVVPLPELQVQTPRXQVNR

SEQ ID NO: 11289 - protein, 13 aa, Artificial Sequence
  Cyclic GFR-binding peptide
IKRIQVPRLDQSV

SEQ ID NO: 11290 - protein, 19 aa, Artificial Sequence
  Cyclic GFR-binding peptide
  MOD_RES (14), (15): Xaa is C or S
MIQITINSLAQPVXXPAAS

SEQ ID NO: 11291 - protein, 18 aa, Artificial Sequence
  Cyclic GFR-binding peptide
VKPTRGVMIQITINSLDQ

SEQ ID NO: 11292 - protein, 26 aa, Artificial Sequence
  Cyclic GFR-binding peptide
  MOD_RES (20), (21): Xaa is C or S
KPKRGVVKAIKVSRLAQPVXXPAASA

SEQ ID NO: 11293 - protein, 17 aa, Artificial Sequence
  Cyclic GFR-binding peptide
  MOD_RES (14), (15): Xaa is C or S
IKRIQVPRLDQPVXXPS

SEQ ID NO: 11294 - protein, 13 aa, Artificial Sequence
  Cyclic GFR-binding peptide
YYVMPLPEEETPV

SEQ ID NO: 11295 - protein, 22 aa, Artificial Sequence
  Cyclic GFR-binding peptide
  MOD_RES (16), (17): Xaa is C or S
EDIKRMQVPRLETPVXXAKPIS

SEQ ID NO: 11296 - protein, 13 aa, Artificial Sequence
  Cyclic GFR-binding peptide
VKAIKVSRLAQPV

SEQ ID NO: 11297 - protein, 19 aa, Artificial Sequence
  Cyclic GFR-binding peptide
VVKENEDIKRMQVPRLETP

SEQ ID NO: 11298 - protein, 19 aa, Artificial Sequence
  Cyclic GFR-binding peptide
  MOD_RES (14), (15): Xaa is C or S
VKAIKVSRLDQPVXXPSAS

SEQ ID NO: 11299 - protein, 26 aa, Artificial Sequence
  Cyclic GFR-binding peptide
  MOD_RES (20), (21): Xaa is C or S
VNSSDDIKRVQVPRLQTPAXXPKPVT

SEQ ID NO: 11300 - protein, 21 aa, Artificial Sequence
  Cyclic GFR-binding peptide
  MOD_RES (17), (17): Xaa is C or S
EYYLVTLPEHHVRSPQXKVSS

SEQ ID NO: 11301 - protein, 21 aa, Artificial Sequence
  Cyclic GFR-binding peptide
  MOD_RES (15), (15): Xaa is C or S
DMIQVTINSLKTPAXTPKTVH

SEQ ID NO: 11302 - protein, 17 aa, Artificial Sequence
  Cyclic GFR-binding peptide
  MOD_RES (14), (14): Xaa is C or S
YYVMPLPEEETPVXELG

SEQ ID NO: 11303 - protein, 23 aa, Artificial Sequence
  Cyclic GFR-binding peptide
  MOD_RES (17), (18): Xaa is C or S
SDDMIQVTINSLKTPAXXPKPVY

SEQ ID NO: 11304 - protein, 25 aa, Artificial Sequence
  Cyclic GFR-binding peptide
  MOD_RES (19), (20): Xaa is C or S
PTKGIIKRIQVPRLDQSVXXPSASA

SEQ ID NO: 11305 - protein, 20 aa, Artificial Sequence
  Cyclic GFR-binding peptide
  MOD_RES (14), (15): Xaa is C or S
MIQMTINSLETPVXXAKPIS

SEQ ID NO: 11306 - protein, 21 aa, Artificial Sequence
  Cyclic GFR-binding peptide
HQGQHPKIRYYLMTLPEEETP

SEQ ID NO: 11307 - protein, 17 aa, Artificial Sequence
  Cyclic GFR-binding peptide
  MOD_RES (14), (15): Xaa is C or S
VKAVKVSRLKTPAXXPK

SEQ ID NO: 11308 - protein, 15 aa, Artificial Sequence
  Cyclic GFR-binding peptide
  MOD_RES (14), (14): Xaa is C or S
MIQVTINSLKTPAXT

SEQ ID NO: 11309 - protein, 25 aa, Artificial Sequence
  Cyclic GFR-binding peptide
  MOD_RES (21), (21): Xaa is C or S
KRVYEYYVVPLPEHHVRSPQXKVSS

SEQ ID NO: 11310 - protein, 20 aa, Artificial Sequence
  Cyclic GFR-binding peptide
  MOD_RES (14), (15): Xaa is C or S
VKAIKVSRLAQPVXXPAASA

SEQ ID NO: 11311 - protein, 27 aa, Artificial Sequence
  Cyclic GFR-binding peptide
  MOD_RES (21), (22): Xaa is C or S
IVNSSDDMIQVTINSLKTPAXXPKPVY

SEQ ID NO: 11312 - protein, 23 aa, Artificial Sequence
  Cyclic GFR-binding peptide
  MOD_RES (17), (18): Xaa is C or S
RGVIKRIQVPRLDQPVXXPSASA

SEQ ID NO: 11313 - protein, 27 aa, Artificial Sequence
  Cyclic GFR-binding peptide
  MOD_RES (23), (23): Xaa is C or S
PKKRVIEYYLVTLPELQVQTPRXQVNR

SEQ ID NO: 11314 - protein, 22 aa, Artificial Sequence
  Cyclic GFR-binding peptide
  MOD_RES (16), (17): Xaa is C or S
GVIKRIQVPRLDQPVXXPSASA

SEQ ID NO: 11315 - protein, 23 aa, Artificial Sequence
  Cyclic GFR-binding peptide
  MOD_RES (17), (18): Xaa is C or S
SDDMIQVTINSLQTPAXXPKPVT

SEQ ID NO: 11316 - protein, 17 aa, Artificial Sequence
  Cyclic GFR-binding peptide
IKPTKGIIKRIQVPRLD

SEQ ID NO: 11317 - protein, 20 aa, Artificial Sequence
  Cyclic GFR-binding peptide
  MOD_RES (14), (15): Xaa is C or S
MIQVTINSLKTPAXXPKPVY

SEQ ID NO: 11318 - protein, 18 aa, Artificial Sequence
  Cyclic GFR-binding peptide
  MOD_RES (14), (15): Xaa is C or S
IKRIQVPRLDQPVXXPSA

SEQ ID NO: 11319 - protein, 17 aa, Artificial Sequence
  Cyclic GFR-binding peptide
  MOD_RES (16), (16): Xaa is C or S
YYLVTLPELQVQTPRXQ

SEQ ID NO: 11320 - protein, 23 aa, Artificial Sequence
  Cyclic GFR-binding peptide
  MOD_RES (17), (17): Xaa is C or S
SDDIKRVQVPRLKTPAXTPKTVH

SEQ ID NO: 11321 - protein, 18 aa, Artificial Sequence
  Cyclic GFR-binding peptide
  MOD_RES (16), (16): Xaa is C or S
YYLVTLPELQVQTPRXQV

SEQ ID NO: 11322 - protein, 23 aa, Artificial Sequence
  Cyclic GFR-binding peptide
  MOD_RES (17), (18): Xaa is C or S
NEDIKRMQVPRLETPVXXAKPIK

SEQ ID NO: 11323 - protein, 18 aa, Artificial Sequence
  Cyclic GFR-binding peptide
IVNSSDDMIQVTINSLKT

SEQ ID NO: 11324 - protein, 20 aa, Artificial Sequence
  Cyclic GFR-binding peptide
  MOD_RES (16), (16): Xaa is C or S
YYLVTLPELQVQTPRXQVNR

SEQ ID NO: 11325 - protein, 16 aa, Artificial Sequence
  Cyclic GFR-binding peptide
VKPTRGVVKAIKVSRL

SEQ ID NO: 11326 - protein, 22 aa, Artificial Sequence
  Cyclic GFR-binding peptide
  MOD_RES (16), (17): Xaa is C or S
DDMIQVTINSLKTPAXXPKPVY

SEQ ID NO: 11327 - protein, 17 aa, Artificial Sequence
  Cyclic GFR-binding peptide
HQGQHPKIRYYLMTLPE

SEQ ID NO: 11328 - protein, 14 aa, Artificial Sequence
  Cyclic GFR-binding peptide
  MOD_RES (14), (14): Xaa is C or S
MIQVTINSLQTPAX

SEQ ID NO: 11329 - protein, 18 aa, Artificial Sequence
  Cyclic GFR-binding peptide
IVNSSDDMIQVTINSLQT

SEQ ID NO: 11330 - protein, 27 aa, Artificial Sequence
  Cyclic GFR-binding peptide
  MOD_RES (21), (22): Xaa is C or S
VKPTRGVMIQITINSLDQPVXXPSASA

SEQ ID NO: 11331 - protein, 19 aa, Artificial Sequence
  Cyclic GFR-binding peptide
  MOD_RES (14), (15): Xaa is C or S
MIQITINSLDQPVXXPSAS

SEQ ID NO: 11332 - protein, 16 aa, Artificial Sequence
  Cyclic GFR-binding peptide
VKPTRGVIKRIQVPRL

SEQ ID NO: 11333 - protein, 17 aa, Artificial Sequence
  Cyclic GFR-binding peptide
  MOD_RES (14), (15): Xaa is C or S
VKAIKVSRLAQPVXXPA

SEQ ID NO: 11334 - protein, 13 aa, Artificial Sequence
  Cyclic GFR-binding peptide
YYLVTLPEHHVRS

SEQ ID NO: 11335 - protein, 19 aa, Artificial Sequence
  Cyclic GFR-binding peptide
  MOD_RES (14), (15): Xaa is C or S
MIQVTINSLQTPAXXPKPV

SEQ ID NO: 11336 - protein, 22 aa, Artificial Sequence
  Cyclic GFR-binding peptide
  MOD_RES (16), (17): Xaa is C or S
DDVKAVKVSRLKTPAXXPKPVY

SEQ ID NO: 11337 - protein, 27 aa, Artificial Sequence
  Cyclic GFR-binding peptide
  MOD_RES (21), (22): Xaa is C or S
VKPTRGVIKRIQVPRLDQPVXXPSASA

SEQ ID NO: 11338 - protein, 22 aa, Artificial Sequence
  Cyclic GFR-binding peptide
  MOD_RES (16), (17): Xaa is C or S
GVVKAIKVSRLDQPVXXPSASA

SEQ ID NO: 11339 - protein, 20 aa, Artificial Sequence
  Cyclic GFR-binding peptide
  MOD_RES (14), (15): Xaa is C or S
IKRVQVPRLQTPAXXPKPVT

SEQ ID NO: 11340 - protein, 16 aa, Artificial Sequence
  Cyclic GFR-binding peptide
  MOD_RES (14), (15): Xaa is C or S
MIQVTINSLKTPAXXP

SEQ ID NO: 11341 - protein, 19 aa, Artificial Sequence
  Cyclic GFR-binding peptide
  MOD_RES (14), (15): Xaa is C or S
IKRVQVPRLQTPAXXPKPV

SEQ ID NO: 11342 - protein, 20 aa, Artificial Sequence
  Cyclic GFR-binding peptide
  MOD_RES (16), (16): Xaa is C or S
YYLVTLPEHHVRSPQXKVSS

SEQ ID NO: 11343 - protein, 26 aa, Artificial Sequence
  Cyclic GFR-binding peptide
  MOD_RES (20), (21): Xaa is C or S
VNSSDDVKAVKVSRLQTPAXXPKPVT

SEQ ID NO: 11344 - protein, 15 aa, Artificial Sequence
  Cyclic GFR-binding peptide
  MOD_RES (14), (15): Xaa is C or S
MIQVTINSLQTPAXX

SEQ ID NO: 11345 - protein, 16 aa, Artificial Sequence
  Cyclic GFR-binding peptide
VKPKRGVIKRIQVPRL

SEQ ID NO: 11346 - protein, 16 aa, Artificial Sequence
  Cyclic GFR-binding peptide
  MOD_RES (14), (15): Xaa is C or S
IKRIQVPRLDQSVXXP

SEQ ID NO: 11347 - protein, 13 aa, Artificial Sequence
  Cyclic GFR-binding peptide
MIQITINSLDQSV

SEQ ID NO: 11348 - protein, 27 aa, Artificial Sequence
  Cyclic GFR-binding peptide
  MOD_RES (21), (21): Xaa is C or S
IVNSSDDVKAVKVSRLKTPAXTPKTVH

SEQ ID NO: 11349 - protein, 18 aa, Artificial Sequence
  Cyclic GFR-binding peptide
  MOD_RES (16), (16): Xaa is C or S
YYVVPLPELQVQTPRXQV

SEQ ID NO: 11350 - protein, 19 aa, Artificial Sequence
  Cyclic GFR-binding peptide
  MOD_RES (16), (16): Xaa is C or S
YYVVPLPEHHVRSPQXKVS

SEQ ID NO: 11351 - protein, 25 aa, Artificial Sequence
  Cyclic GFR-binding peptide
  MOD_RES (19), (19): Xaa is C or S
HPKIRYYVMPLPEEETPVXELGEDN

SEQ ID NO: 11352 - protein, 15 aa, Artificial Sequence
  Cyclic GFR-binding peptide
VVKENEDIKRMQVPR

SEQ ID NO: 11353 - protein, 23 aa, Artificial Sequence
  Cyclic GFR-binding peptide
  MOD_RES (17), (18): Xaa is C or S
SDDIKRVQVPRLQTPAXXPKPVT

SEQ ID NO: 11354 - protein, 19 aa, Artificial Sequence
  Cyclic GFR-binding peptide
IVNSSDDIKRVQVPRLKTP

SEQ ID NO: 11355 - protein, 18 aa, Artificial Sequence
  Cyclic GFR-binding peptide
  MOD_RES (14), (15): Xaa is C or S
MIQITINSLDQPVXXPSA

SEQ ID NO: 11356 - protein, 19 aa, Artificial Sequence
  Cyclic GFR-binding peptide
IVNSSDDIKRVQVPRLQTP

SEQ ID NO: 11357 - protein, 16 aa, Artificial Sequence
  Cyclic GFR-binding peptide
  MOD_RES (14), (14): Xaa is C or S
MIQVTINSLKTPAXTP

SEQ ID NO: 11358 - protein, 16 aa, Artificial Sequence
  Cyclic GFR-binding peptide
VVKDYEDMIQMTINSL

SEQ ID NO: 11359 - protein, 18 aa, Artificial Sequence
  Cyclic GFR-binding peptide
HQGQHPKIRYYLMTLPEE

SEQ ID NO: 11360 - protein, 22 aa, Artificial Sequence
  Cyclic GFR-binding peptide
  MOD_RES (16), (17): Xaa is C or S
DDIKRVQVPRLKTPAXXPKPVY

SEQ ID NO: 11361 - protein, 13 aa, Artificial Sequence
  Cyclic GFR-binding peptide
IKRIQVPRLAQPV

SEQ ID NO: 11362 - protein, 26 aa, Artificial Sequence
  Cyclic GFR-binding peptide
  MOD_RES (20), (21): Xaa is C or S
VKENEDMIQMTINSLETPVXXAKPIK

SEQ ID NO: 11363 - protein, 17 aa, Artificial Sequence
  Cyclic GFR-binding peptide
VVKDYEDVKAMKVSRLE

SEQ ID NO: 11364 - protein, 23 aa, Artificial Sequence
  Cyclic GFR-binding peptide
  MOD_RES (17), (18): Xaa is C or S
SDDIKRVQVPRLKTPAXXPKPVY

SEQ ID NO: 11365 - protein, 19 aa, Artificial Sequence
  Cyclic GFR-binding peptide
  MOD_RES (14), (15): Xaa is C or S
MIQVTINSLKTPAXXPKPV

SEQ ID NO: 11366 - protein, 23 aa, Artificial Sequence
  Cyclic GFR-binding peptide
  MOD_RES (17), (18): Xaa is C or S
RGVVKAIKVSRLDQPVXXPSASA

SEQ ID NO: 11367 - protein, 18 aa, Artificial Sequence
  Cyclic GFR-binding peptide
  MOD_RES (14), (15): Xaa is C or S
VKAVKVSRLQTPAXXPKP

SEQ ID NO: 11368 - protein, 19 aa, Artificial Sequence
  Cyclic GFR-binding peptide
IVNSSDDMIQVTINSLKTP

SEQ ID NO: 11369 - protein, 27 aa, Artificial Sequence
  Cyclic GFR-binding peptide
  MOD_RES (21), (22): Xaa is C or S
IVNSSDDIKRVQVPRLQTPAXXPKPVT

SEQ ID NO: 11370 - protein, 17 aa, Artificial Sequence
  Cyclic GFR-binding peptide
VVKDYEDIKRMQVPRLE

SEQ ID NO: 11371 - protein, 19 aa, Artificial Sequence
  Cyclic GFR-binding peptide
IVNSSDDMIQVTINSLQTP

SEQ ID NO: 11372 - protein, 20 aa, Artificial Sequence
  Cyclic GFR-binding peptide
  MOD_RES (14), (15): Xaa is C or S
MIQITINSLDQSVXXPSASA

SEQ ID NO: 11373 - protein, 27 aa, Artificial Sequence
  Cyclic GFR-binding peptide
  MOD_RES (21), (22): Xaa is C or S
VVKDYEDVKAMKVSRLETPVXXAKPIS

SEQ ID NO: 11374 - protein, 20 aa, Artificial Sequence
  Cyclic GFR-binding peptide
  MOD_RES (14), (14): Xaa is C or S
IKRVQVPRLKTPAXTPKTVH

SEQ ID NO: 11375 - protein, 29 aa, Artificial Sequence
  Cyclic GFR-binding peptide
  MOD_RES (25), (25): Xaa is C or S
FIPKKRVIEYYLVTLPELQVQTPRXQVNR

SEQ ID NO: 11376 - protein, 26 aa, Artificial Sequence
  Cyclic GFR-binding peptide
  MOD_RES (20), (21): Xaa is C or S
KPKRGVMIQITINSLAQPVXXPAASA

SEQ ID NO: 11377 - protein, 16 aa, Artificial Sequence
  Cyclic GFR-binding peptide
  MOD_RES (14), (15): Xaa is C or S
IKRVQVPRLQTPAXXP

SEQ ID NO: 11378 - protein, 24 aa, Artificial Sequence
  Cyclic GFR-binding peptide
  MOD_RES (18), (19): Xaa is C or S
TKGIIKRIQVPRLDQSVXXPSASA

SEQ ID NO: 11379 - protein, 16 aa, Artificial Sequence
  Cyclic GFR-binding peptide
VKPKRGVVKAIKVSRL

SEQ ID NO: 11380 - protein, 17 aa, Artificial Sequence
  Cyclic GFR-binding peptide
  MOD_RES (16), (16): Xaa is C or S
YYVVPLPELQVQTPRXQ

SEQ ID NO: 11381 - protein, 25 aa, Artificial Sequence
  Cyclic GFR-binding peptide
  MOD_RES (19), (20): Xaa is C or S
NSSDDIKRVQVPRLQTPAXXPKPVT

SEQ ID NO: 11382 - protein, 17 aa, Artificial Sequence
  Cyclic GFR-binding peptide
IKPTKGIMIQITINSLD

SEQ ID NO: 11383 - protein, 15 aa, Artificial Sequence
  Cyclic GFR-binding peptide
  MOD_RES (14), (14): Xaa is C or S
IKRVQVPRLKTPAXT

SEQ ID NO: 11384 - protein, 14 aa, Artificial Sequence
  Cyclic GFR-binding peptide
  MOD_RES (14), (14): Xaa is C or S
VKAIKVSRLDQPVX

SEQ ID NO: 11385 - protein, 18 aa, Artificial Sequence
  Cyclic GFR-binding peptide
FIPKKRVIEYYVVPLPEL

SEQ ID NO: 11386 - protein, 27 aa, Artificial Sequence
  Cyclic GFR-binding peptide
  MOD_RES (21), (22): Xaa is C or S
IVNSSDDVKAVKVSRLQTPAXXPKPVT

SEQ ID NO: 11387 - protein, 29 aa, Artificial Sequence
  Cyclic GFR-binding peptide
  MOD_RES (25), (25): Xaa is C or S
LKPKKRVYEYYVVPLPEHHVRSPQXKVSS

SEQ ID NO: 11388 - protein, 13 aa, Artificial Sequence
  Cyclic GFR-binding peptide
MIQITINSLAQPV

SEQ ID NO: 11389 - protein, 21 aa, Artificial Sequence
  Cyclic GFR-binding peptide
FIPKKRVIEYYVVPLPELQVQ

SEQ ID NO: 11390 - protein, 14 aa, Artificial Sequence
  Cyclic GFR-binding peptide
  MOD_RES (14), (14): Xaa is C or S
IKRVQVPRLQTPAX

SEQ ID NO: 11391 - protein, 20 aa, Artificial Sequence
  Cyclic GFR-binding peptide
LKPKKRVYEYYLVTLPEHHV

SEQ ID NO: 11392 - protein, 19 aa, Artificial Sequence
  Cyclic GFR-binding peptide
  MOD_RES (14), (15): Xaa is C or S
IKRIQVPRLAQPVXXPAAS

SEQ ID NO: 11393 - protein, 15 aa, Artificial Sequence
  Cyclic GFR-binding peptide
VVKDYEDIKRMQVPR

SEQ ID NO: 11394 - protein, 23 aa, Artificial Sequence
  Cyclic GFR-binding peptide
  MOD_RES (17), (18): Xaa is C or S
NEDMIQMTINSLETPVXXAKPIK

SEQ ID NO: 11395 - protein, 16 aa, Artificial Sequence
  Cyclic GFR-binding peptide
IKPTKGIVKAIKVSRL

SEQ ID NO: 11396 - protein, 26 aa, Artificial Sequence
  Cyclic GFR-binding peptide
  MOD_RES (20), (21): Xaa is C or S
VNSSDDMIQVTINSLQTPAXXPKPVT

SEQ ID NO: 11397 - protein, 23 aa, Artificial Sequence
  Cyclic GFR-binding peptide
  MOD_RES (19), (19): Xaa is C or S
VIEYYLVTLPELQVQTPRXQVNR

SEQ ID NO: 11398 - protein, 17 aa, Artificial Sequence
  Cyclic GFR-binding peptide
LKPKKRVYEYYVVPLPE

SEQ ID NO: 11399 - protein, 21 aa, Artificial Sequence
  Cyclic GFR-binding peptide
  MOD_RES (15), (15): Xaa is C or S
RYYVMPLPEEETPVXELGEDN

SEQ ID NO: 11400 - protein, 21 aa, Artificial Sequence
  Cyclic GFR-binding peptide
  MOD_RES (15), (16): Xaa is C or S
DIKRVQVPRLQTPAXXPKPVT

SEQ ID NO: 11401 - protein, 20 aa, Artificial Sequence
  Cyclic GFR-binding peptide
  MOD_RES (14), (15): Xaa is C or S
IKRMQVPRLETPVXXAKPIS

SEQ ID NO: 11402 - protein, 19 aa, Artificial Sequence
  Cyclic GFR-binding peptide
LKPKKRVYEYYVVPLPEHH

SEQ ID NO: 11403 - protein, 15 aa, Artificial Sequence
  Cyclic GFR-binding peptide
VKPTRGVVKAIKVSR

SEQ ID NO: 11404 - protein, 22 aa, Artificial Sequence
  Cyclic GFR-binding peptide
  MOD_RES (16), (16): Xaa is C or S
IRYYVMPLPEEETPVXELGEDN

SEQ ID NO: 11405 - protein, 22 aa, Artificial Sequence
  Cyclic GFR-binding peptide
  MOD_RES (16), (17): Xaa is C or S
DDIKRVQVPRLQTPAXXPKPVT

SEQ ID NO: 11406 - protein, 15 aa, Artificial Sequence
  Cyclic GFR-binding peptide
IVNSSDDVKAVKVSR

SEQ ID NO: 11407 - protein, 25 aa, Artificial Sequence
  Cyclic GFR-binding peptide
  MOD_RES (19), (20): Xaa is C or S
KENEDIKRMQVPRLETPVXXAKPIK

SEQ ID NO: 11408 - protein, 21 aa, Artificial Sequence
  Cyclic GFR-binding peptide
  MOD_RES (15), (16): Xaa is C or S
DIKRMQVPRLETPVXXAKPIS

SEQ ID NO: 11409 - protein, 15 aa, Artificial Sequence
  Cyclic GFR-binding peptide
  MOD_RES (14), (15): Xaa is C or S
IKRVQVPRLKTPAXX

SEQ ID NO: 11410 - protein, 18 aa, Artificial Sequence
  Cyclic GFR-binding peptide
VKPKRGVIKRIQVPRLAQ

SEQ ID NO: 11411 - protein, 19 aa, Artificial Sequence
  Cyclic GFR-binding peptide
  MOD_RES (14), (14): Xaa is C or S
MIQVTINSLKTPAXTPKTV

SEQ ID NO: 11412 - protein, 23 aa, Artificial Sequence
  Cyclic GFR-binding peptide
  MOD_RES (17), (17): Xaa is C or S
SDDMIQVTINSLKTPAXTPKTVH

SEQ ID NO: 11413 - protein, 19 aa, Artificial Sequence
  Cyclic GFR-binding peptide
VKPTRGVMIQITINSLDQP

SEQ ID NO: 11414 - protein, 25 aa, Artificial Sequence
  Cyclic GFR-binding peptide
  MOD_RES (19), (20): Xaa is C or S
PTRGVIKRIQVPRLDQPVXXPSASA

SEQ ID NO: 11415 - protein, 24 aa, Artificial Sequence
  Cyclic GFR-binding peptide
  MOD_RES (18), (19): Xaa is C or S
SSDDVKAVKVSRLQTPAXXPKPVT

SEQ ID NO: 11416 - protein, 22 aa, Artificial Sequence
  Cyclic GFR-binding peptide
  MOD_RES (16), (17): Xaa is C or S
DDVKAVKVSRLQTPAXXPKPVT

SEQ ID NO: 11417 - protein, 18 aa, Artificial Sequence
  Cyclic GFR-binding peptide
  MOD_RES (14), (15): Xaa is C or S
IKRMQVPRLETPVXXAKP

SEQ ID NO: 11418 - protein, 21 aa, Artificial Sequence
  Cyclic GFR-binding peptide
  MOD_RES (15), (16): Xaa is C or S
DMIQVTINSLKTPAXXPKPVY

SEQ ID NO: 11419 - protein, 20 aa, Artificial Sequence
  Cyclic GFR-binding peptide
HQGQHPKIRYYLMTLPEEET

SEQ ID NO: 11420 - protein, 20 aa, Artificial Sequence
  Cyclic GFR-binding peptide
  MOD_RES (14), (15): Xaa is C or S
MIQMTINSLETPVXXAKPIK

SEQ ID NO: 11421 - protein, 18 aa, Artificial Sequence
  Cyclic GFR-binding peptide
  MOD_RES (14), (15): Xaa is C or S
IKRIQVPRLDQSVXXPSA

SEQ ID NO: 11422 - protein, 15 aa, Artificial Sequence
  Cyclic GFR-binding peptide
  MOD_RES (14), (15): Xaa is C or S
MIQVTINSLKTPAXX

SEQ ID NO: 11423 - protein, 20 aa, Artificial Sequence
  Cyclic GFR-binding peptide
  MOD_RES (14), (15): Xaa is C or S
IKRIQVPRLDQSVXXPSASA

SEQ ID NO: 11424 - protein, 13 aa, Artificial Sequence
  Cyclic GFR-binding peptide
MIQITINSLDQPV

SEQ ID NO: 11425 - protein, 20 aa, Artificial Sequence
  Cyclic GFR-binding peptide
  MOD_RES (16), (16): Xaa is C or S
YYVVPLPELQVQTPRXQVNR

SEQ ID NO: 11426 - protein, 19 aa, Artificial Sequence
  Cyclic GFR-binding peptide
  MOD_RES (14), (15): Xaa is C or S
IKRVQVPRLKTPAXXPKPV

SEQ ID NO: 11427 - protein, 22 aa, Artificial Sequence
  Cyclic GFR-binding peptide
  MOD_RES (16), (17): Xaa is C or S
DDMIQVTINSLQTPAXXPKPVT

SEQ ID NO: 11428 - protein, 17 aa, Artificial Sequence
  Cyclic GFR-binding peptide
VKPKRGVVKAIKVSRLA

SEQ ID NO: 11429 - protein, 17 aa, Artificial Sequence
  Cyclic GFR-binding peptide
  MOD_RES (14), (14): Xaa is C or S
VKAVKVSRLKTPAXTPK

SEQ ID NO: 11430 - protein, 23 aa, Artificial Sequence
  Cyclic GFR-binding peptide
  MOD_RES (17), (17): Xaa is C or S
KIRYYVMPLPEEETPVXELGEDN

SEQ ID NO: 11431 - protein, 22 aa, Artificial Sequence
  Cyclic GFR-binding peptide
  MOD_RES (16), (17): Xaa is C or S
GVMIQITINSLDQPVXXPSASA

SEQ ID NO: 11432 - protein, 21 aa, Artificial Sequence
  Cyclic GFR-binding peptide
  MOD_RES (15), (16): Xaa is C or S
DVKAMKVSRLETPVXXAKPIS

SEQ ID NO: 11433 - protein, 20 aa, Artificial Sequence
  Cyclic GFR-binding peptide
  MOD_RES (14), (15): Xaa is C or S
IKRMQVPRLETPVXXAKPIK

SEQ ID NO: 11434 - protein, 18 aa, Artificial Sequence
  Cyclic GFR-binding peptide
  MOD_RES (14), (15): Xaa is C or S
MIQITINSLDQSVXXPSA

SEQ ID NO: 11435 - protein, 26 aa, Artificial Sequence
  Cyclic GFR-binding peptide
  MOD_RES (20), (21): Xaa is C or S
VKENEDVKAMKVSRLETPVXXAKPIK

SEQ ID NO: 11436 - protein, 24 aa, Artificial Sequence
  Cyclic GFR-binding peptide
  MOD_RES (18), (19): Xaa is C or S
SSDDMIQVTINSLQTPAXXPKPVT

SEQ ID NO: 11437 - protein, 26 aa, Artificial Sequence
  Cyclic GFR-binding peptide
  MOD_RES (22), (22): Xaa is C or S
KKRVYEYYLVTLPEHHVRSPQXKVSS

SEQ ID NO: 11438 - protein, 17 aa, Artificial Sequence
  Cyclic GFR-binding peptide
  MOD_RES (14), (15): Xaa is C or S
IKRMQVPRLETPVXXAK

SEQ ID NO: 11439 - protein, 15 aa, Artificial Sequence
  Cyclic GFR-binding peptide
  MOD_RES (14), (14): Xaa is C or S
YYVMPLPEEETPVXE

SEQ ID NO: 11440 - protein, 21 aa, Artificial Sequence
  Cyclic GFR-binding peptide
  MOD_RES (15), (16): Xaa is C or S
IIKRIQVPRLDQSVXXPSASA

SEQ ID NO: 11441 - protein, 21 aa, Artificial Sequence
  Cyclic GFR-binding peptide
  MOD_RES (15), (16): Xaa is C or S
DVKAVKVSRLQTPAXXPKPVT

SEQ ID NO: 11442 - protein, 21 aa, Artificial Sequence
  Cyclic GFR-binding peptide
  MOD_RES (15), (16): Xaa is C or S
VVKAIKVSRLDQPVXXPSASA

SEQ ID NO: 11443 - protein, 17 aa, Artificial Sequence
  Cyclic GFR-binding peptide
  MOD_RES (16), (16): Xaa is C or S
YYLVTLPEHHVRSPQXK

SEQ ID NO: 11444 - protein, 25 aa, Artificial Sequence
  Cyclic GFR-binding peptide
  MOD_RES (21), (21): Xaa is C or S
KRVYEYYLVTLPEHHVRSPQXKVSS

SEQ ID NO: 11445 - protein, 17 aa, Artificial Sequence
  Cyclic GFR-binding peptide
VVKENEDVKAMKVSRLE

SEQ ID NO: 11446 - protein, 17 aa, Artificial Sequence
  Cyclic GFR-binding peptide
FIPKKRVIEYYLVTLPE

SEQ ID NO: 11447 - protein, 15 aa, Artificial Sequence
  Cyclic GFR-binding peptide
  MOD_RES (14), (15): Xaa is C or S
IKRVQVPRLQTPAXX

SEQ ID NO: 11448 - protein, 19 aa, Artificial Sequence
  Cyclic GFR-binding peptide
VKPKRGVVKAIKVSRLAQP

SEQ ID NO: 11449 - protein, 13 aa, Artificial Sequence
  Cyclic GFR-binding peptide
VKAMKVSRLETPV

SEQ ID NO: 11450 - protein, 27 aa, Artificial Sequence
  Cyclic GFR-binding peptide
  MOD_RES (21), (22): Xaa is C or S
VVKENEDMIQMTINSLETPVXXAKPIK

SEQ ID NO: 11451 - protein, 22 aa, Artificial Sequence
  Cyclic GFR-binding peptide
  MOD_RES (16), (17): Xaa is C or S
GIIKRIQVPRLDQSVXXPSASA

SEQ ID NO: 11452 - protein, 27 aa, Artificial Sequence
  Cyclic GFR-binding peptide
  MOD_RES (23), (23): Xaa is C or S
PKKRVYEYYVVPLPEHHVRSPQXKVSS

SEQ ID NO: 11453 - protein, 19 aa, Artificial Sequence
  Cyclic GFR-binding peptide
  MOD_RES (16), (16): Xaa is C or S
YYLVTLPEHHVRSPQXKVS

SEQ ID NO: 11454 - protein, 19 aa, Artificial Sequence
  Cyclic GFR-binding peptide
VVKENEDMIQMTINSLETP

SEQ ID NO: 11455 - protein, 17 aa, Artificial Sequence
  Cyclic GFR-binding peptide
VKPTRGVMIQITINSLD

SEQ ID NO: 11456 - protein, 16 aa, Artificial Sequence
  Cyclic GFR-binding peptide
  MOD_RES (14), (15): Xaa is C or S
MIQVTINSLQTPAXXP

SEQ ID NO: 11457 - protein, 20 aa, Artificial Sequence
  Cyclic GFR-binding peptide
  MOD_RES (14), (14): Xaa is C or S
MIQVTINSLKTPAXTPKTVH

SEQ ID NO: 11458 - protein, 14 aa, Artificial Sequence
  Cyclic GFR-binding peptide
  MOD_RES (14), (14): Xaa is C or S
IKRVQVPRLKTPAX

SEQ ID NO: 11459 - protein, 17 aa, Artificial Sequence
  Cyclic GFR-binding peptide
IVNSSDDMIQVTINSLQ

SEQ ID NO: 11460 - protein, 17 aa, Artificial Sequence
  Cyclic GFR-binding peptide
HQGQHPKIRYYVMPLPE

SEQ ID NO: 11461 - protein, 15 aa, Artificial Sequence
  Cyclic GFR-binding peptide
IKPTKGIVKAIKVSR

SEQ ID NO: 11462 - protein, 26 aa, Artificial Sequence
  Cyclic GFR-binding peptide
  MOD_RES (20), (20): Xaa is C or S
QHPKIRYYVMPLPEEETPVXELGEDN

SEQ ID NO: 11463 - protein, 15 aa, Artificial Sequence
  Cyclic GFR-binding peptide
  MOD_RES (14), (14): Xaa is C or S
VKAVKVSRLKTPAXT

SEQ ID NO: 11464 - protein, 26 aa, Artificial Sequence
  Cyclic GFR-binding peptide
  MOD_RES (20), (20): Xaa is C or S
VNSSDDMIQVTINSLKTPAXTPKTVH

SEQ ID NO: 11465 - protein, 22 aa, Artificial Sequence
  Cyclic GFR-binding peptide
  MOD_RES (16), (17): Xaa is C or S
GIVKAIKVSRLDQSVXXPSASA

SEQ ID NO: 11466 - protein, 26 aa, Artificial Sequence
  Cyclic GFR-binding peptide
  MOD_RES (20), (21): Xaa is C or S
VNSSDDMIQVTINSLKTPAXXPKPVY

SEQ ID NO: 11467 - protein, 24 aa, Artificial Sequence
  Cyclic GFR-binding peptide
  MOD_RES (18), (19): Xaa is C or S
DYEDVKAMKVSRLETPVXXAKPIS

SEQ ID NO: 11468 - protein, 19 aa, Artificial Sequence
  Cyclic GFR-binding peptide
  MOD_RES (14), (14): Xaa is C or S
IKRVQVPRLKTPAXTPKTV

SEQ ID NO: 11469 - protein, 20 aa, Artificial Sequence
  Cyclic GFR-binding peptide
  MOD_RES (14), (15): Xaa is C or S
MIQITINSLAQPVXXPAASA

SEQ ID NO: 11470 - protein, 16 aa, Artificial Sequence
  Cyclic GFR-binding peptide
  MOD_RES (14), (15): Xaa is C or S
VKAIKVSRLDQSVXXP

SEQ ID NO: 11471 - protein, 23 aa, Artificial Sequence
  Cyclic GFR-binding peptide
  MOD_RES (17), (18): Xaa is C or S
RGVVKAIKVSRLAQPVXXPAASA

SEQ ID NO: 11472 - protein, 18 aa, Artificial Sequence
  Cyclic GFR-binding peptide
IKPTKGIIKRIQVPRLDQ

SEQ ID NO: 11473 - protein, 17 aa, Artificial Sequence
  Cyclic GFR-binding peptide
IVNSSDDMIQVTINSLK

SEQ ID NO: 11474 - protein, 22 aa, Artificial Sequence
  Cyclic GFR-binding peptide
  MOD_RES (16), (16): Xaa is C or S
IRYYLMTLPEEETPVXELGEDN

SEQ ID NO: 11475 - protein, 27 aa, Artificial Sequence
  Cyclic GFR-binding peptide
  MOD_RES (21), (21): Xaa is C or S
GQHPKIRYYLMTLPEEETPVXELGEDN

SEQ ID NO: 11476 - protein, 24 aa, Artificial Sequence
  Cyclic GFR-binding peptide
  MOD_RES (18), (19): Xaa is C or S
KRGVIKRIQVPRLAQPVXXPAASA

SEQ ID NO: 11477 - protein, 20 aa, Artificial Sequence
  Cyclic GFR-binding peptide
  MOD_RES (14), (14): Xaa is C or S
VKAVKVSRLKTPAXTPKTVH

SEQ ID NO: 11478 - protein, 13 aa, Artificial Sequence
  Cyclic GFR-binding peptide
VKAVKVSRLKTPA

SEQ ID NO: 11479 - protein, 16 aa, Artificial Sequence
  Cyclic GFR-binding peptide
VVKENEDIKRMQVPRL

SEQ ID NO: 11480 - protein, 25 aa, Artificial Sequence
  Cyclic GFR-binding peptide
  MOD_RES (19), (20): Xaa is C or S
PKRGVVKAIKVSRLAQPVXXPAASA

SEQ ID NO: 11481 - protein, 26 aa, Artificial Sequence
  Cyclic GFR-binding peptide
  MOD_RES (20), (21): Xaa is C or S
KPTRGVVKAIKVSRLDQPVXXPSASA

SEQ ID NO: 11482 - protein, 15 aa, Artificial Sequence
  Cyclic GFR-binding peptide
YYLVTLPELQVQTPR

SEQ ID NO: 11483 - protein, 25 aa, Artificial Sequence
  Cyclic GFR-binding peptide
  MOD_RES (19), (20): Xaa is C or S
PKRGVMIQITINSLAQPVXXPAASA

SEQ ID NO: 11484 - protein, 18 aa, Artificial Sequence
  Cyclic GFR-binding peptide
  MOD_RES (14), (15): Xaa is C or S
MIQVTINSLQTPAXXPKP

SEQ ID NO: 11485 - protein, 25 aa, Artificial Sequence
  Cyclic GFR-binding peptide
  MOD_RES (19), (20): Xaa is C or S
NSSDDIKRVQVPRLKTPAXXPKPVY

SEQ ID NO: 11486 - protein, 22 aa, Artificial Sequence
  Cyclic GFR-binding peptide
  MOD_RES (18), (18): Xaa is C or S
IEYYLVTLPELQVQTPRXQVNR

SEQ ID NO: 11487 - protein, 20 aa, Artificial Sequence
  Cyclic GFR-binding peptide
FIPKKRVIEYYLVTLPELQV

SEQ ID NO: 11488 - protein, 25 aa, Artificial Sequence
  Cyclic GFR-binding peptide
  MOD_RES (19), (20): Xaa is C or S
KENEDMIQMTINSLETPVXXAKPIK

SEQ ID NO: 11489 - protein, 25 aa, Artificial Sequence
  Cyclic GFR-binding peptide
  MOD_RES (21), (21): Xaa is C or S
KRVIEYYLVTLPELQVQTPRXQVNR

SEQ ID NO: 11490 - protein, 27 aa, Artificial Sequence
  Cyclic GFR-binding peptide
  MOD_RES (21), (22): Xaa is C or S
VKPKRGVVKAIKVSRLAQPVXXPAASA

SEQ ID NO: 11491 - protein, 24 aa, Artificial Sequence
  Cyclic GFR-binding peptide
  MOD_RES (18), (19): Xaa is C or S
SSDDIKRVQVPRLKTPAXXPKPVY

SEQ ID NO: 11492 - protein, 17 aa, Artificial Sequence
  Cyclic GFR-binding peptide
  MOD_RES (14), (15): Xaa is C or S
IKRVQVPRLKTPAXXPK

SEQ ID NO: 11493 - protein, 17 aa, Artificial Sequence
  Cyclic GFR-binding peptide
  MOD_RES (16), (16): Xaa is C or S
YYVVPLPEHHVRSPQXK

SEQ ID NO: 11494 - protein, 20 aa, Artificial Sequence
  Cyclic GFR-binding peptide
  MOD_RES (14), (15): Xaa is C or S
IKRIQVPRLDQPVXXPSASA

SEQ ID NO: 11495 - protein, 15 aa, Artificial Sequence
  Cyclic GFR-binding peptide
VKPKRGVVKAIKVSR

SEQ ID NO: 11496 - protein, 16 aa, Artificial Sequence
  Cyclic GFR-binding peptide
  MOD_RES (14), (15): Xaa is C or S
VKAIKVSRLAQPVXXP

SEQ ID NO: 11497 - protein, 17 aa, Artificial Sequence
  Cyclic GFR-binding peptide
  MOD_RES (14), (15): Xaa is C or S
MIQMTINSLETPVXXAK

SEQ ID NO: 11498 - protein, 20 aa, Artificial Sequence
  Cyclic GFR-binding peptide
  MOD_RES (14), (15): Xaa is C or S
IKRIQVPRLAQPVXXPAASA

SEQ ID NO: 11499 - protein, 23 aa, Artificial Sequence
  Cyclic GFR-binding peptide
  MOD_RES (17), (18): Xaa is C or S
RGVMIQITINSLAQPVXXPAASA

SEQ ID NO: 11500 - protein, 15 aa, Artificial Sequence
  Cyclic GFR-binding peptide
  MOD_RES (14), (15): Xaa is C or S
VKAVKVSRLKTPAXX

SEQ ID NO: 11501 - protein, 18 aa, Artificial Sequence
  Cyclic GFR-binding peptide
VVKDYEDIKRMQVPRLET

SEQ ID NO: 11502 - protein, 19 aa, Artificial Sequence
  Cyclic GFR-binding peptide
HQGQHPKIRYYLMTLPEEE

SEQ ID NO: 11503 - protein, 22 aa, Artificial Sequence
  Cyclic GFR-binding peptide
  MOD_RES (16), (17): Xaa is C or S
EDVKAMKVSRLETPVXXAKPIS

SEQ ID NO: 11504 - protein, 22 aa, Artificial Sequence
  Cyclic GFR-binding peptide
  MOD_RES (16), (16): Xaa is C or S
DDVKAVKVSRLKTPAXTPKTVH

SEQ ID NO: 11505 - protein, 16 aa, Artificial Sequence
  Cyclic GFR-binding peptide
IVNSSDDMIQVTINSL

SEQ ID NO: 11506 - protein, 27 aa, Artificial Sequence
  Cyclic GFR-binding peptide
  MOD_RES (21), (22): Xaa is C or S
VKPKRGVMIQITINSLAQPVXXPAASA

SEQ ID NO: 11507 - protein, 27 aa, Artificial Sequence
  Cyclic GFR-binding peptide
  MOD_RES (21), (22): Xaa is C or S
IKPTKGIIKRIQVPRLDQSVXXPSASA

SEQ ID NO: 11508 - protein, 19 aa, Artificial Sequence
  Cyclic GFR-binding peptide
VVKDYEDIKRMQVPRLETP

SEQ ID NO: 11509 - protein, 21 aa, Artificial Sequence
  Cyclic GFR-binding peptide
  MOD_RES (15), (16): Xaa is C or S
VIKRIQVPRLDQPVXXPSASA

SEQ ID NO: 11510 - protein, 29 aa, Artificial Sequence
  Cyclic GFR-binding peptide
  MOD_RES (25), (25): Xaa is C or S
LKPKKRVYEYYLVTLPEHHVRSPQXKVSS

SEQ ID NO: 11511 - protein, 20 aa, Artificial Sequence
  Cyclic GFR-binding peptide
  MOD_RES (14), (14): Xaa is C or S
YYLMTLPEEETPVXELGEDN

SEQ ID NO: 11512 - protein, 28 aa, Artificial Sequence
  Cyclic GFR-binding peptide
  MOD_RES (22), (22): Xaa is C or S
QGQHPKIRYYLMTLPEEETPVXELGEDN

SEQ ID NO: 11513 - protein, 26 aa, Artificial Sequence
  Cyclic GFR-binding peptide
  MOD_RES (20), (21): Xaa is C or S
KPTKGIVKAIKVSRLDQSVXXPSASA

SEQ ID NO: 11514 - protein, 14 aa, Artificial Sequence
  Cyclic GFR-binding peptide
  MOD_RES (14), (14): Xaa is C or S
MIQVTINSLKTPAX

SEQ ID NO: 11515 - protein, 16 aa, Artificial Sequence
  Cyclic GFR-binding peptide
IVNSSDDVKAVKVSRL

SEQ ID NO: 11516 - protein, 16 aa, Artificial Sequence
  Cyclic GFR-binding peptide
  MOD_RES (16), (16): Xaa is C or S
YYVVPLPELQVQTPRX

SEQ ID NO: 11517 - protein, 17 aa, Artificial Sequence
  Cyclic GFR-binding peptide
IVNSSDDVKAVKVSRLK

SEQ ID NO: 11518 - protein, 17 aa, Artificial Sequence
  Cyclic GFR-binding peptide
IVNSSDDVKAVKVSRLQ

SEQ ID NO: 11519 - protein, 20 aa, Artificial Sequence
  Cyclic GFR-binding peptide
  MOD_RES (14), (15): Xaa is C or S
VKAMKVSRLETPVXXAKPIK

SEQ ID NO: 11520 - protein, 18 aa, Artificial Sequence
  Cyclic GFR-binding peptide
VVKENEDVKAMKVSRLET

SEQ ID NO: 11521 - protein, 21 aa, Artificial Sequence
  Cyclic GFR-binding peptide
LKPKKRVYEYYVVPLPEHHVR

SEQ ID NO: 11522 - protein, 19 aa, Artificial Sequence
  Cyclic GFR-binding peptide
  MOD_RES (14), (14): Xaa is C or S
YYLMTLPEEETPVXELGED

SEQ ID NO: 11523 - protein, 16 aa, Artificial Sequence
  Cyclic GFR-binding peptide
  MOD_RES (14), (15): Xaa is C or S
VKAIKVSRLDQPVXXP

SEQ ID NO: 11524 - protein, 14 aa, Artificial Sequence
  Cyclic GFR-binding peptide
YYVVPLPELQVQTP

SEQ ID NO: 11525 - protein, 25 aa, Artificial Sequence
  Cyclic GFR-binding peptide
  MOD_RES (19), (20): Xaa is C or S
NSSDDVKAVKVSRLKTPAXXPKPVY

SEQ ID NO: 11526 - protein, 18 aa, Artificial Sequence
  Cyclic GFR-binding peptide
  MOD_RES (16), (16): Xaa is C or S
YYVVPLPEHHVRSPQXKV

SEQ ID NO: 11527 - protein, 21 aa, Artificial Sequence
  Cyclic GFR-binding peptide
  MOD_RES (17), (17): Xaa is C or S
EYYVVPLPELQVQTPRXQVNR

SEQ ID NO: 11528 - protein, 16 aa, Artificial Sequence
  Cyclic GFR-binding peptide
  MOD_RES (16), (16): Xaa is C or S
YYVVPLPEHHVRSPQX

SEQ ID NO: 11529 - protein, 19 aa, Artificial Sequence
  Cyclic GFR-binding peptide
  MOD_RES (14), (15): Xaa is C or S
MIQITINSLDQSVXXPSAS

SEQ ID NO: 11530 - protein, 19 aa, Artificial Sequence
  Cyclic GFR-binding peptide
IKPTKGIMIQITINSLDQS

SEQ ID NO: 11531 - protein, 27 aa, Artificial Sequence
  Cyclic GFR-binding peptide
  MOD_RES (21), (22): Xaa is C or S
VVKDYEDMIQMTINSLETPVXXAKPIS

SEQ ID NO: 11532 - protein, 18 aa, Artificial Sequence
  Cyclic GFR-binding peptide
VVKENEDMIQMTINSLET

SEQ ID NO: 11533 - protein, 25 aa, Artificial Sequence
  Cyclic GFR-binding peptide
  MOD_RES (19), (20): Xaa is C or S
PKRGVIKRIQVPRLAQPVXXPAASA

SEQ ID NO: 11534 - protein, 25 aa, Artificial Sequence
  Cyclic GFR-binding peptide
  MOD_RES (19), (20): Xaa is C or S
NSSDDMIQVTINSLKTPAXXPKPVY

SEQ ID NO: 11535 - protein, 15 aa, Artificial Sequence
  Cyclic GFR-binding peptide
VKPKRGVMIQITINS

SEQ ID NO: 11536 - protein, 26 aa, Artificial Sequence
  Cyclic GFR-binding peptide
  MOD_RES (22), (22): Xaa is C or S
KKRVYEYYVVPLPEHHVRSPQXKVSS

SEQ ID NO: 11537 - protein, 18 aa, Artificial Sequence
  Cyclic GFR-binding peptide
  MOD_RES (14), (14): Xaa is C or S
YYLMTLPEEETPVXELGE

SEQ ID NO: 11538 - protein, 18 aa, Artificial Sequence
  Cyclic GFR-binding peptide
  MOD_RES (14), (15): Xaa is C or S
VKAVKVSRLKTPAXXPKP

SEQ ID NO: 11539 - protein, 15 aa, Artificial Sequence
  Cyclic GFR-binding peptide
YYLVTLPEHHVRSPQ

SEQ ID NO: 11540 - protein, 22 aa, Artificial Sequence
  Cyclic GFR-binding peptide
  MOD_RES (18), (18): Xaa is C or S
IEYYVVPLPELQVQTPRXQVNR

SEQ ID NO: 11541 - protein, 17 aa, Artificial Sequence
  Cyclic GFR-binding peptide
VVKENEDIKRMQVPRLE

SEQ ID NO: 11542 - protein, 24 aa, Artificial Sequence
  Cyclic GFR-binding peptide
  MOD_RES (18), (19): Xaa is C or S
DYEDMIQMTINSLETPVXXAKPIS

SEQ ID NO: 11543 - protein, 24 aa, Artificial Sequence
  Cyclic GFR-binding peptide
  MOD_RES (18), (19): Xaa is C or S
TKGIMIQITINSLDQSVXXPSASA

SEQ ID NO: 11544 - protein, 29 aa, Artificial Sequence
  Cyclic GFR-binding peptide
  MOD_RES (23), (23): Xaa is C or S
HQGQHPKIRYYLMTLPEEETPVXELGEDN

SEQ ID NO: 11545 - protein, 23 aa, Artificial Sequence
  Cyclic GFR-binding peptide
  MOD_RES (17), (18): Xaa is C or S
RGVMIQITINSLDQPVXXPSASA

SEQ ID NO: 11546 - protein, 20 aa, Artificial Sequence
  Cyclic GFR-binding peptide
  MOD_RES (14), (15): Xaa is C or S
MIQVTINSLQTPAXXPKPVT

SEQ ID NO: 11547 - protein, 24 aa, Artificial Sequence
  Cyclic GFR-binding peptide
  MOD_RES (18), (19): Xaa is C or S
SSDDIKRVQVPRLQTPAXXPKPVT

SEQ ID NO: 11548 - protein, 19 aa, Artificial Sequence
  Cyclic GFR-binding peptide
IKPTKGIVKAIKVSRLDQS

SEQ ID NO: 11549 - protein, 26 aa, Artificial Sequence
  Cyclic GFR-binding peptide
  MOD_RES (20), (21): Xaa is C or S
KPKRGVIKRIQVPRLAQPVXXPAASA

SEQ ID NO: 11550 - protein, 20 aa, Artificial Sequence
  Cyclic GFR-binding peptide
  MOD_RES (14), (14): Xaa is C or S
YYVMPLPEEETPVXELGEDN

SEQ ID NO: 11551 - protein, 23 aa, Artificial Sequence
  Cyclic GFR-binding peptide
  MOD_RES (17), (18): Xaa is C or S
KGIMIQITINSLDQSVXXPSASA

SEQ ID NO: 11552 - protein, 18 aa, Artificial Sequence
  Cyclic GFR-binding peptide
  MOD_RES (14), (14): Xaa is C or S
YYVMPLPEEETPVXELGE

SEQ ID NO: 11553 - protein, 14 aa, Artificial Sequence
  Cyclic GFR-binding peptide
YYLVTLPEHHVRSP

SEQ ID NO: 11554 - protein, 15 aa, Artificial Sequence
  Cyclic GFR-binding peptide
YYVVPLPEHHVRSPQ

SEQ ID NO: 11555 - protein, 16 aa, Artificial Sequence
  Cyclic GFR-binding peptide
  MOD_RES (14), (15): Xaa is C or S
VKAVKVSRLQTPAXXP

SEQ ID NO: 11556 - protein, 25 aa, Artificial Sequence
  Cyclic GFR-binding peptide
  MOD_RES (21), (21): Xaa is C or S
KRVIEYYVVPLPELQVQTPRXQVNR

SEQ ID NO: 11557 - protein, 23 aa, Artificial Sequence
  Cyclic GFR-binding peptide
  MOD_RES (17), (18): Xaa is C or S
SDDVKAVKVSRLQTPAXXPKPVT

SEQ ID NO: 11558 - protein, 24 aa, Artificial Sequence
  Cyclic GFR-binding peptide
  MOD_RES (18), (19): Xaa is C or S
TRGVIKRIQVPRLDQPVXXPSASA

SEQ ID NO: 11559 - protein, 18 aa, Artificial Sequence
  Cyclic GFR-binding peptide
  MOD_RES (16), (16): Xaa is C or S
YYLVTLPEHHVRSPQXKV

SEQ ID NO: 11560 - protein, 20 aa, Artificial Sequence
  Cyclic GFR-binding peptide
  MOD_RES (16), (16): Xaa is C or S
YYVVPLPEHHVRSPQXKVSS

SEQ ID NO: 11561 - protein, 27 aa, Artificial Sequence
  Cyclic GFR-binding peptide
  MOD_RES (23), (23): Xaa is C or S
PKKRVYEYYLVTLPEHHVRSPQXKVSS

SEQ ID NO: 11562 - protein, 16 aa, Artificial Sequence
  Cyclic GFR-binding peptide
  MOD_RES (14), (15): Xaa is C or S
IKRIQVPRLDQPVXXP

SEQ ID NO: 11563 - protein, 28 aa, Artificial Sequence
  Cyclic GFR-binding peptide
  MOD_RES (24), (24): Xaa is C or S
IPKKRVIEYYLVTLPELQVQTPRXQVNR

SEQ ID NO: 11564 - protein, 20 aa, Artificial Sequence
  Cyclic GFR-binding peptide
FIPKKRVIEYYVVPLPELQV

SEQ ID NO: 11565 - protein, 21 aa, Artificial Sequence
  Cyclic GFR-binding peptide
  MOD_RES (15), (15): Xaa is C or S
DVKAVKVSRLKTPAXTPKTVH

SEQ ID NO: 11566 - protein, 20 aa, Artificial Sequence
  Cyclic GFR-binding peptide
  MOD_RES (14), (15): Xaa is C or S
MIQITINSLDQPVXXPSASA

SEQ ID NO: 11567 - protein, 23 aa, Artificial Sequence
  Cyclic GFR-binding peptide
  MOD_RES (17), (18): Xaa is C or S
YEDIKRMQVPRLETPVXXAKPIS

SEQ ID NO: 11568 - protein, 15 aa, Artificial Sequence
  Cyclic GFR-binding peptide
IKPTKGIMIQITINS

SEQ ID NO: 11569 - protein, 19 aa, Artificial Sequence
  Cyclic GFR-binding peptide
  MOD_RES (14), (14): Xaa is C or S
YYVMPLPEEETPVXELGED

SEQ ID NO: 11570 - protein, 24 aa, Artificial Sequence
  Cyclic GFR-binding peptide
  MOD_RES (18), (19): Xaa is C or S
TKGIVKAIKVSRLDQSVXXPSASA

SEQ ID NO: 11571 - protein, 21 aa, Artificial Sequence
  Cyclic GFR-binding peptide
  MOD_RES (15), (15): Xaa is C or S
RYYLMTLPEEETPVXELGEDN

SEQ ID NO: 11572 - protein, 18 aa, Artificial Sequence
  Cyclic GFR-binding peptide
  MOD_RES (14), (15): Xaa is C or S
VKAIKVSRLAQPVXXPAA

SEQ ID NO: 11573 - protein, 13 aa, Artificial Sequence
  Cyclic GFR-binding peptide
YYVVPLPEHHVRS

SEQ ID NO: 11574 - protein, 19 aa, Artificial Sequence
  Cyclic GFR-binding peptide
VKPKRGVIKRIQVPRLAQP

SEQ ID NO: 11575 - protein, 16 aa, Artificial Sequence
  Cyclic GFR-binding peptide
  MOD_RES (16), (16): Xaa is C or S
YYLVTLPEHHVRSPQX

SEQ ID NO: 11576 - protein, 19 aa, Artificial Sequence
  Cyclic GFR-binding peptide
FIPKKRVIEYYVVPLPELQ

SEQ ID NO: 11577 - protein, 27 aa, Artificial Sequence
  Cyclic GFR-binding peptide
  MOD_RES (21), (22): Xaa is C or S
VVKENEDVKAMKVSRLETPVXXAKPIK

SEQ ID NO: 11578 - protein, 27 aa, Artificial Sequence
  Cyclic GFR-binding peptide
  MOD_RES (21), (22): Xaa is C or S
IVNSSDDMIQVTINSLQTPAXXPKPVT

SEQ ID NO: 11579 - protein, 16 aa, Artificial Sequence
  Cyclic GFR-binding peptide
  MOD_RES (14), (15): Xaa is C or S
IKRIQVPRLAQPVXXP

SEQ ID NO: 11580 - protein, 27 aa, Artificial Sequence
  Cyclic GFR-binding peptide
  MOD_RES (21), (22): Xaa is C or S
VKPTRGVVKAIKVSRLDQPVXXPSASA

SEQ ID NO: 11581 - protein, 25 aa, Artificial Sequence
  Cyclic GFR-binding peptide
  MOD_RES (19), (20): Xaa is C or S
PTRGVMIQITINSLDQPVXXPSASA

SEQ ID NO: 11582 - protein, 17 aa, Artificial Sequence
  Cyclic GFR-binding peptide
VVKDYEDMIQMTINSLE

SEQ ID NO: 11583 - protein, 20 aa, Artificial Sequence
  Cyclic GFR-binding peptide
  MOD_RES (14), (15): Xaa is C or S
VKAIKVSRLDQPVXXPSASA

SEQ ID NO: 11584 - protein, 19 aa, Artificial Sequence
  Cyclic GFR-binding peptide
  MOD_RES (14), (15): Xaa is C or S
IKRIQVPRLDQSVXXPSAS

SEQ ID NO: 11585 - protein, 23 aa, Artificial Sequence
  Cyclic GFR-binding peptide
  MOD_RES (19), (19): Xaa is C or S
VIEYYVVPLPELQVQTPRXQVNR

SEQ ID NO: 11586 - protein, 19 aa, Artificial Sequence
  Cyclic GFR-binding peptide
VVKENEDVKAMKVSRLETP

SEQ ID NO: 11587 - protein, 25 aa, Artificial Sequence
  Cyclic GFR-binding peptide
  MOD_RES (19), (20): Xaa is C or S
NSSDDMIQVTINSLQTPAXXPKPVT

SEQ ID NO: 11588 - protein, 24 aa, Artificial Sequence
  Cyclic GFR-binding peptide
  MOD_RES (18), (19): Xaa is C or S
DYEDIKRMQVPRLETPVXXAKPIS

SEQ ID NO: 11589 - protein, 19 aa, Artificial Sequence
  Cyclic GFR-binding peptide
VKPKRGVMIQITINSLAQP

SEQ ID NO: 11590 - protein, 23 aa, Artificial Sequence
  Cyclic GFR-binding peptide
  MOD_RES (17), (18): Xaa is C or S
KGIVKAIKVSRLDQSVXXPSASA

SEQ ID NO: 11591 - protein, 13 aa, Artificial Sequence
  Cyclic GFR-binding peptide
IKRVQVPRLQTPA

SEQ ID NO: 11592 - protein, 13 aa, Artificial Sequence
  Cyclic GFR-binding peptide
MIQVTINSLKTPA

SEQ ID NO: 11593 - protein, 27 aa, Artificial Sequence
  Cyclic GFR-binding peptide
  MOD_RES (21), (22): Xaa is C or S
VVKENEDIKRMQVPRLETPVXXAKPIK

SEQ ID NO: 11594 - protein, 15 aa, Artificial Sequence
  Cyclic GFR-binding peptide
  MOD_RES (14), (15): Xaa is C or S
IKRIQVPRLAQPVXX

SEQ ID NO: 11595 - protein, 14 aa, Artificial Sequence
  Cyclic GFR-binding peptide
  MOD_RES (14), (14): Xaa is C or S
VKAMKVSRLETPVX

SEQ ID NO: 11596 - protein, 25 aa, Artificial Sequence
  Cyclic GFR-binding peptide
  MOD_RES (19), (20): Xaa is C or S
NSSDDVKAVKVSRLQTPAXXPKPVT

SEQ ID NO: 11597 - protein, 14 aa, Artificial Sequence
  Cyclic GFR-binding peptide
  MOD_RES (14), (14): Xaa is C or S
MIQITINSLAQPVX

SEQ ID NO: 11598 - protein, 17 aa, Artificial Sequence
  Cyclic GFR-binding peptide
IKPTKGIVKAIKVSRLD

SEQ ID NO: 11599 - protein, 24 aa, Artificial Sequence
  Cyclic GFR-binding peptide
  MOD_RES (18), (19): Xaa is C or S
KRGVVKAIKVSRLAQPVXXPAASA

SEQ ID NO: 11600 - protein, 16 aa, Artificial Sequence
  Cyclic GFR-binding peptide
VKPKRGVMIQITINSL

SEQ ID NO: 11601 - protein, 16 aa, Artificial Sequence
  Cyclic GFR-binding peptide
  MOD_RES (14), (15): Xaa is C or S
MIQITINSLDQSVXXP

SEQ ID NO: 11602 - protein, 18 aa, Artificial Sequence
  Cyclic GFR-binding peptide
  MOD_RES (14), (15): Xaa is C or S
IKRIQVPRLAQPVXXPAA

SEQ ID NO: 11603 - protein, 26 aa, Artificial Sequence
  Cyclic GFR-binding peptide
  MOD_RES (20), (21): Xaa is C or S
VKDYEDIKRMQVPRLETPVXXAKPIS

SEQ ID NO: 11604 - protein, 16 aa, Artificial Sequence
  Cyclic GFR-binding peptide
  MOD_RES (14), (15): Xaa is C or S
MIQMTINSLETPVXXA

SEQ ID NO: 11605 - protein, 21 aa, Artificial Sequence
  Cyclic GFR-binding peptide
  MOD_RES (15), (16): Xaa is C or S
DVKAVKVSRLKTPAXXPKPVY

SEQ ID NO: 11606 - protein, 23 aa, Artificial Sequence
  Cyclic GFR-binding peptide
  MOD_RES (17), (18): Xaa is C or S
KGIIKRIQVPRLDQSVXXPSASA

SEQ ID NO: 11607 - protein, 17 aa, Artificial Sequence
  Cyclic GFR-binding peptide
VKPKRGVIKRIQVPRLA

SEQ ID NO: 11608 - protein, 19 aa, Artificial Sequence
  Cyclic GFR-binding peptide
IVNSSDDVKAVKVSRLQTP

SEQ ID NO: 11609 - protein, 17 aa, Artificial Sequence
  Cyclic GFR-binding peptide
  MOD_RES (14), (15): Xaa is C or S
VKAIKVSRLDQPVXXPS

SEQ ID NO: 11610 - protein, 24 aa, Artificial Sequence
  Cyclic GFR-binding peptide
  MOD_RES (18), (19): Xaa is C or S
ENEDIKRMQVPRLETPVXXAKPIK

SEQ ID NO: 11611 - protein, 17 aa, Artificial Sequence
  Cyclic GFR-binding peptide
  MOD_RES (14), (15): Xaa is C or S
VKAMKVSRLETPVXXAK

SEQ ID NO: 11612 - protein, 16 aa, Artificial Sequence
  Cyclic GFR-binding peptide
VKPTRGVMIQITINSL

SEQ ID NO: 11613 - protein, 19 aa, Artificial Sequence
  Cyclic GFR-binding peptide
  MOD_RES (14), (14): Xaa is C or S
VKAVKVSRLKTPAXTPKTV

SEQ ID NO: 11614 - protein, 18 aa, Artificial Sequence
  Cyclic GFR-binding peptide
  MOD_RES (14), (15): Xaa is C or S
MIQITINSLAQPVXXPAA

SEQ ID NO: 11615 - protein, 18 aa, Artificial Sequence
  Cyclic GFR-binding peptide
IVNSSDDVKAVKVSRLKT

SEQ ID NO: 11616 - protein, 18 aa, Artificial Sequence
  Cyclic GFR-binding peptide
IVNSSDDVKAVKVSRLQT

SEQ ID NO: 11617 - protein, 26 aa, Artificial Sequence
  Cyclic GFR-binding peptide
  MOD_RES (20), (21): Xaa is C or S
VKENEDIKRMQVPRLETPVXXAKPIK

SEQ ID NO: 11618 - protein, 26 aa, Artificial Sequence
  Cyclic GFR-binding peptide
  MOD_RES (20), (21): Xaa is C or S
VKDYEDMIQMTINSLETPVXXAKPIS

SEQ ID NO: 11619 - protein, 23 aa, Artificial Sequence
  Cyclic GFR-binding peptide
  MOD_RES (17), (18): Xaa is C or S
NEDVKAMKVSRLETPVXXAKPIK

SEQ ID NO: 11620 - protein, 19 aa, Artificial Sequence
  Cyclic GFR-binding peptide
IVNSSDDVKAVKVSRLKTP

SEQ ID NO: 11621 - protein, 18 aa, Artificial Sequence
  Cyclic GFR-binding peptide
  MOD_RES (14), (15): Xaa is C or S
VKAIKVSRLDQSVXXPSA

SEQ ID NO: 11622 - protein, 18 aa, Artificial Sequence
  Cyclic GFR-binding peptide
IVNSSDDIKRVQVPRLQT

SEQ ID NO: 11623 - protein, 18 aa, Artificial Sequence
  Cyclic GFR-binding peptide
IVNSSDDIKRVQVPRLKT

SEQ ID NO: 11624 - protein, 29 aa, Artificial Sequence
  Cyclic GFR-binding peptide
  MOD_RES (23), (23): Xaa is C or S
HQGQHPKIRYYVMPLPEEETPVXELGEDN

SEQ ID NO: 11625 - protein, 19 aa, Artificial Sequence
  Cyclic GFR-binding peptide
VKPTRGVVKAIKVSRLDQP

SEQ ID NO: 11626 - protein, 14 aa, Artificial Sequence
  Cyclic GFR-binding peptide
  MOD_RES (14), (14): Xaa is C or S
VKAVKVSRLKTPAX

SEQ ID NO: 11627 - protein, 18 aa, Artificial Sequence
  Cyclic GFR-binding peptide
  MOD_RES (14), (15): Xaa is C or S
IKRVQVPRLKTPAXXPKP

SEQ ID NO: 11628 - protein, 27 aa, Artificial Sequence
  Cyclic GFR-binding peptide
  MOD_RES (21), (21): Xaa is C or S
IVNSSDDIKRVQVPRLKTPAXTPKTVH

SEQ ID NO: 11629 - protein, 24 aa, Artificial Sequence
  Cyclic GFR-binding peptide
  MOD_RES (18), (18): Xaa is C or S
SSDDVKAVKVSRLKTPAXTPKTVH

SEQ ID NO: 11630 - protein, 19 aa, Artificial Sequence
  Cyclic GFR-binding peptide
VKPTRGVIKRIQVPRLDQP

SEQ ID NO: 11631 - protein, 21 aa, Artificial Sequence
  Cyclic GFR-binding peptide
  MOD_RES (15), (16): Xaa is C or S
VVKAIKVSRLAQPVXXPAASA

SEQ ID NO: 11632 - protein, 19 aa, Artificial Sequence
  Cyclic GFR-binding peptide
  MOD_RES (14), (15): Xaa is C or S
MIQMTINSLETPVXXAKPI

SEQ ID NO: 11633 - protein, 27 aa, Artificial Sequence
  Cyclic GFR-binding peptide
  MOD_RES (21), (21): Xaa is C or S
IVNSSDDMIQVTINSLKTPAXTPKTVH

SEQ ID NO: 11634 - protein, 16 aa, Artificial Sequence
  Cyclic GFR-binding peptide
VVKDYEDVKAMKVSRL

SEQ ID NO: 11635 - protein, 27 aa, Artificial Sequence
  Cyclic GFR-binding peptide
  MOD_RES (21), (22): Xaa is C or S
VVKDYEDIKRMQVPRLETPVXXAKPIS

SEQ ID NO: 11636 - protein, 16 aa, Artificial Sequence
  Cyclic GFR-binding peptide
  MOD_RES (14), (15): Xaa is C or S
MIQITINSLAQPVXXP

SEQ ID NO: 11637 - protein, 28 aa, Artificial Sequence
  Cyclic GFR-binding peptide
  MOD_RES (24), (24): Xaa is C or S
KPKKRVYEYYLVTLPEHHVRSPQXKVSS

SEQ ID NO: 11638 - protein, 16 aa, Artificial Sequence
  Cyclic GFR-binding peptide
  MOD_RES (14), (15): Xaa is C or S
MIQITINSLDQPVXXP

SEQ ID NO: 11639 - protein, 14 aa, Artificial Sequence
  Cyclic GFR-binding peptide
YYVVPLPEHHVRSP

SEQ ID NO: 11640 - protein, 17 aa, Artificial Sequence
  Cyclic GFR-binding peptide
  MOD_RES (14), (14): Xaa is C or S
MIQVTINSLKTPAXTPK

SEQ ID NO: 11641 - protein, 16 aa, Artificial Sequence
  Cyclic GFR-binding peptide
VVKDYEDIKRMQVPRL

SEQ ID NO: 11642 - protein, 24 aa, Artificial Sequence
  Cyclic GFR-binding peptide
  MOD_RES (18), (18): Xaa is C or S
SSDDMIQVTINSLKTPAXTPKTVH

SEQ ID NO: 11643 - protein, 15 aa, Artificial Sequence
  Cyclic GFR-binding peptide
  MOD_RES (14), (15): Xaa is C or S
MIQITINSLDQSVXX

SEQ ID NO: 11644 - protein, 15 aa, Artificial Sequence
  Cyclic GFR-binding peptide
VKPTRGVMIQITINS

SEQ ID NO: 11645 - protein, 27 aa, Artificial Sequence
  Cyclic GFR-binding peptide
  MOD_RES (21), (21): Xaa is C or S
GQHPKIRYYVMPLPEEETPVXELGEDN

SEQ ID NO: 11646 - protein, 16 aa, Artificial Sequence
  Cyclic GFR-binding peptide
  MOD_RES (14), (14): Xaa is C or S
YYVMPLPEEETPVXEL

SEQ ID NO: 11647 - protein, 25 aa, Artificial Sequence
  Cyclic GFR-binding peptide
  MOD_RES (19), (19): Xaa is C or S
NSSDDIKRVQVPRLKTPAXTPKTVH

SEQ ID NO: 11648 - protein, 15 aa, Artificial Sequence
  Cyclic GFR-binding peptide
VVKENEDMIQMTINS

SEQ ID NO: 11649 - protein, 25 aa, Artificial Sequence
  Cyclic GFR-binding peptide
  MOD_RES (19), (20): Xaa is C or S
PTKGIMIQITINSLDQSVXXPSASA

SEQ ID NO: 11650 - protein, 20 aa, Artificial Sequence
  Cyclic GFR-binding peptide
LKPKKRVYEYYVVPLPEHHV

SEQ ID NO: 11651 - protein, 25 aa, Artificial Sequence
  Cyclic GFR-binding peptide
  MOD_RES (19), (19): Xaa is C or S
HPKIRYYLMTLPEEETPVXELGEDN

SEQ ID NO: 11652 - protein, 17 aa, Artificial Sequence
  Cyclic GFR-binding peptide
FIPKKRVIEYYVVPLPE

SEQ ID NO: 11653 - protein, 18 aa, Artificial Sequence
  Cyclic GFR-binding peptide
HQGQHPKIRYYVMPLPEE

SEQ ID NO: 11654 - protein, 21 aa, Artificial Sequence
  Cyclic GFR-binding peptide
  MOD_RES (17), (17): Xaa is C or S
EYYLVTLPELQVQTPRXQVNR

SEQ ID NO: 11655 - protein, 22 aa, Artificial Sequence
  Cyclic GFR-binding peptide
  MOD_RES (16), (17): Xaa is C or S
GVVKAIKVSRLAQPVXXPAASA

SEQ ID NO: 11656 - protein, 26 aa, Artificial Sequence
  Cyclic GFR-binding peptide
  MOD_RES (20), (21): Xaa is C or S
KPTKGIIKRIQVPRLDQSVXXPSASA

SEQ ID NO: 11657 - protein, 18 aa, Artificial Sequence
  Cyclic GFR-binding peptide
VVKENEDIKRMQVPRLET

SEQ ID NO: 11658 - protein, 18 aa, Artificial Sequence
  Cyclic GFR-binding peptide
  MOD_RES (14), (14): Xaa is C or S
MIQVTINSLKTPAXTPKT

SEQ ID NO: 11659 - protein, 21 aa, Artificial Sequence
  Cyclic GFR-binding peptide
  MOD_RES (15), (16): Xaa is C or S
DIKRVQVPRLKTPAXXPKPVY

SEQ ID NO: 11660 - protein, 21 aa, Artificial Sequence
  Cyclic GFR-binding peptide
  MOD_RES (15), (16): Xaa is C or S
IMIQITINSLDQSVXXPSASA

SEQ ID NO: 11661 - protein, 21 aa, Artificial Sequence
  Cyclic GFR-binding peptide
  MOD_RES (17), (17): Xaa is C or S
EYYVVPLPEHHVRSPQXKVSS

SEQ ID NO: 11662 - protein, 15 aa, Artificial Sequence
  Cyclic GFR-binding peptide
  MOD_RES (14), (15): Xaa is C or S
MIQITINSLDQPVXX

SEQ ID NO: 11663 - protein, 13 aa, Artificial Sequence
  Cyclic GFR-binding peptide
IKRVQVPRLKTPA

SEQ ID NO: 11664 - protein, 17 aa, Artificial Sequence
  Cyclic GFR-binding peptide
VKPTRGVVKAIKVSRLD

SEQ ID NO: 11665 - protein, 13 aa, Artificial Sequence
  Cyclic GFR-binding peptide
MIQVTINSLQTPA

SEQ ID NO: 11666 - protein, 18 aa, Artificial Sequence
  Cyclic GFR-binding peptide
FIPKKRVIEYYLVTLPEL

SEQ ID NO: 11667 - protein, 13 aa, Artificial Sequence
  Cyclic GFR-binding peptide
YYLVTLPELQVQT

SEQ ID NO: 11668 - protein, 15 aa, Artificial Sequence
  Cyclic GFR-binding peptide
  MOD_RES (14), (15): Xaa is C or S
VKAMKVSRLETPVXX

SEQ ID NO: 11669 - protein, 25 aa, Artificial Sequence
  Cyclic GFR-binding peptide
  MOD_RES (19), (20): Xaa is C or S
PTKGIVKAIKVSRLDQSVXXPSASA

SEQ ID NO: 11670 - protein, 17 aa, Artificial Sequence
  Cyclic GFR-binding peptide
  MOD_RES (14), (14): Xaa is C or S
IKRVQVPRLKTPAXTPK

SEQ ID NO: 11671 - protein, 16 aa, Artificial Sequence
  Cyclic GFR-binding peptide
  MOD_RES (14), (15): Xaa is C or S
IKRMQVPRLETPVXXA

SEQ ID NO: 11672 - protein, 14 aa, Artificial Sequence
  Cyclic GFR-binding peptide
YYLVTLPELQVQTP

SEQ ID NO: 11673 - protein, 17 aa, Artificial Sequence
  Cyclic GFR-binding peptide
VKPKRGVMIQITINSLA

SEQ ID NO: 11674 - protein, 21 aa, Artificial Sequence
  Cyclic GFR-binding peptide
LKPKKRVYEYYLVTLPEHHVR

SEQ ID NO: 11675 - protein, 19 aa, Artificial Sequence
  Cyclic GFR-binding peptide
  MOD_RES (16), (16): Xaa is C or S
YYVVPLPELQVQTPRXQVN

SEQ ID NO: 11676 - protein, 13 aa, Artificial Sequence
  Cyclic GFR-binding peptide
YYVVPLPELQVQT

SEQ ID NO: 11677 - protein, 19 aa, Artificial Sequence
  Cyclic GFR-binding peptide
IKPTKGIIKRIQVPRLDQS

SEQ ID NO: 11678 - protein, 16 aa, Artificial Sequence
  Cyclic GFR-binding peptide
IKPTKGIMIQITINSL

SEQ ID NO: 11679 - protein, 22 aa, Artificial Sequence
  Cyclic GFR-binding peptide
  MOD_RES (16), (17): Xaa is C or S
EDMIQMTINSLETPVXXAKPIK

SEQ ID NO: 11680 - protein, 17 aa, Artificial Sequence
  Cyclic GFR-binding peptide
  MOD_RES (14), (15): Xaa is C or S
MIQVTINSLQTPAXXPK

SEQ ID NO: 11681 - protein, 19 aa, Artificial Sequence
  Cyclic GFR-binding peptide
  MOD_RES (14), (15): Xaa is C or S
VKAVKVSRLKTPAXXPKPV

SEQ ID NO: 11682 - protein, 23 aa, Artificial Sequence
  Cyclic GFR-binding peptide
  MOD_RES (17), (17): Xaa is C or S
KIRYYLMTLPEEETPVXELGEDN

SEQ ID NO: 11683 - protein, 20 aa, Artificial Sequence
  Cyclic GFR-binding peptide
  MOD_RES (14), (15): Xaa is C or S
VKAIKVSRLDQSVXXPSASA

SEQ ID NO: 11684 - protein, 24 aa, Artificial Sequence
  Cyclic GFR-binding peptide
  MOD_RES (18), (19): Xaa is C or S
KRGVMIQITINSLAQPVXXPAASA

SEQ ID NO: 11685 - protein, 14 aa, Artificial Sequence
  Cyclic GFR-binding peptide
  MOD_RES (14), (14): Xaa is C or S
IKRIQVPRLAQPVX

SEQ ID NO: 11686 - protein, 21 aa, Artificial Sequence
  Cyclic GFR-binding peptide
  MOD_RES (15), (16): Xaa is C or S
DVKAMKVSRLETPVXXAKPIK

SEQ ID NO: 11687 - protein, 24 aa, Artificial Sequence
  Cyclic GFR-binding peptide
  MOD_RES (18), (19): Xaa is C or S
SSDDVKAVKVSRLKTPAXXPKPVY

SEQ ID NO: 11688 - protein, 15 aa, Artificial Sequence
  Cyclic GFR-binding peptide
IVNSSDDMIQVTINS

SEQ ID NO: 11689 - protein, 20 aa, Artificial Sequence
  Cyclic GFR-binding peptide
  MOD_RES (14), (15): Xaa is C or S
VKAVKVSRLQTPAXXPKPVT

SEQ ID NO: 11690 - protein, 24 aa, Artificial Sequence
  Cyclic GFR-binding peptide
  MOD_RES (18), (19): Xaa is C or S
SSDDMIQVTINSLKTPAXXPKPVY

SEQ ID NO: 11691 - protein, 21 aa, Artificial Sequence
  Cyclic GFR-binding peptide
  MOD_RES (15), (16): Xaa is C or S
DMIQVTINSLQTPAXXPKPVT

SEQ ID NO: 11692 - protein, 18 aa, Artificial Sequence
  Cyclic GFR-binding peptide
  MOD_RES (14), (15): Xaa is C or S
VKAIKVSRLDQPVXXPSA

SEQ ID NO: 11693 - protein, 28 aa, Artificial Sequence
  Cyclic GFR-binding peptide
  MOD_RES (24), (24): Xaa is C or S
KPKKRVYEYYVVPLPEHHVRSPQXKVSS

SEQ ID NO: 11694 - protein, 16 aa, Artificial Sequence
  Cyclic GFR-binding peptide
  MOD_RES (14), (14): Xaa is C or S
YYLMTLPEEETPVXEL

SEQ ID NO: 11695 - protein, 14 aa, Artificial Sequence
  Cyclic GFR-binding peptide
  MOD_RES (14), (14): Xaa is C or S
VKAVKVSRLQTPAX

SEQ ID NO: 11696 - protein, 15 aa, Artificial Sequence
  Cyclic GFR-binding peptide
  MOD_RES (14), (15): Xaa is C or S
MIQITINSLAQPVXX

SEQ ID NO: 11697 - protein, 14 aa, Artificial Sequence
  Cyclic GFR-binding peptide
  MOD_RES (14), (14): Xaa is C or S
IKRIQVPRLDQPVX

SEQ ID NO: 11698 - protein, 18 aa, Artificial Sequence
  Cyclic GFR-binding peptide
  MOD_RES (14), (15): Xaa is C or S
MIQVTINSLKTPAXXPKP

SEQ ID NO: 11699 - protein, 15 aa, Artificial Sequence
  Cyclic GFR-binding peptide
YYVVPLPELQVQTPR

SEQ ID NO: 11700 - protein, 18 aa, Artificial Sequence
  Cyclic GFR-binding peptide
  MOD_RES (14), (15): Xaa is C or S
VKAMKVSRLETPVXXAKP

SEQ ID NO: 11701 - protein, 19 aa, Artificial Sequence
  Cyclic GFR-binding peptide
  MOD_RES (14), (15): Xaa is C or S
VKAIKVSRLAQPVXXPAAS

SEQ ID NO: 11702 - protein, 22 aa, Artificial Sequence
  Cyclic GFR-binding peptide
  MOD_RES (16), (17): Xaa is C or S
EDVKAMKVSRLETPVXXAKPIK

SEQ ID NO: 11703 - protein, 16 aa, Artificial Sequence
  Cyclic GFR-binding peptide
  MOD_RES (16), (16): Xaa is C or S
YYLVTLPELQVQTPRX

SEQ ID NO: 11704 - protein, 14 aa, Artificial Sequence
  Cyclic GFR-binding peptide
  MOD_RES (14), (14): Xaa is C or S
MIQITINSLDQSVX

SEQ ID NO: 11705 - protein, 21 aa, Artificial Sequence
  Cyclic GFR-binding peptide
HQGQHPKIRYYVMPLPEEETP

SEQ ID NO: 11706 - protein, 18 aa, Artificial Sequence
  Cyclic GFR-binding peptide
  MOD_RES (14), (15): Xaa is C or S
IKRVQVPRLQTPAXXPKP

SEQ ID NO: 11707 - protein, 18 aa, Artificial Sequence
  Cyclic GFR-binding peptide
VKPTRGVIKRIQVPRLDQ

SEQ ID NO: 11708 - protein, 23 aa, Artificial Sequence
  Cyclic GFR-binding peptide
  MOD_RES (17), (17): Xaa is C or S
SDDVKAVKVSRLKTPAXTPKTVH

SEQ ID NO: 11709 - protein, 21 aa, Artificial Sequence
  Cyclic GFR-binding peptide
FIPKKRVIEYYLVTLPELQVQ

SEQ ID NO: 11710 - protein, 26 aa, Artificial Sequence
  Cyclic GFR-binding peptide
  MOD_RES (20), (21): Xaa is C or S
KPTRGVIKRIQVPRLDQPVXXPSASA

SEQ ID NO: 11711 - protein, 26 aa, Artificial Sequence
  Cyclic GFR-binding peptide
  MOD_RES (22), (22): Xaa is C or S
KKRVIEYYLVTLPELQVQTPRXQVNR

SEQ ID NO: 11712 - protein, 17 aa, Artificial Sequence
  Cyclic GFR-binding peptide
  MOD_RES (14), (15): Xaa is C or S
MIQVTINSLKTPAXXPK

SEQ ID NO: 11713 - protein, 21 aa, Artificial Sequence
  Cyclic GFR-binding peptide
  MOD_RES (15), (16): Xaa is C or S
DMIQMTINSLETPVXXAKPIS

SEQ ID NO: 11714 - protein, 20 aa, Artificial Sequence
  Cyclic GFR-binding peptide
HQGQHPKIRYYVMPLPEEET

SEQ ID NO: 11715 - protein, 25 aa, Artificial Sequence
  Cyclic GFR-binding peptide
  MOD_RES (19), (20): Xaa is C or S
PTRGVVKAIKVSRLDQPVXXPSASA

SEQ ID NO: 11716 - protein, 21 aa, Artificial Sequence
  Cyclic GFR-binding peptide
  MOD_RES (15), (16): Xaa is C or S
VMIQITINSLDQPVXXPSASA

SEQ ID NO: 11717 - protein, 20 aa, Artificial Sequence
  Cyclic GFR-binding peptide
  MOD_RES (14), (15): Xaa is C or S
VKAMKVSRLETPVXXAKPIS

SEQ ID NO: 11718 - protein, 25 aa, Artificial Sequence
  Cyclic GFR-binding peptide
  MOD_RES (19), (20): Xaa is C or S
KENEDVKAMKVSRLETPVXXAKPIK

SEQ ID NO: 11719 - protein, 15 aa, Artificial Sequence
  Cyclic GFR-binding peptide
IKPTKGIIKRIQVPR

SEQ ID NO: 11720 - protein, 27 aa, Artificial Sequence
  Cyclic GFR-binding peptide
  MOD_RES (21), (22): Xaa is C or S
IVNSSDDVKAVKVSRLKTPAXXPKPVY

SEQ ID NO: 11721 - protein, 19 aa, Artificial Sequence
  Cyclic GFR-binding peptide
HQGQHPKIRYYVMPLPEEE

SEQ ID NO: 11722 - protein, 17 aa, Artificial Sequence
  Cyclic GFR-binding peptide
LKPKKRVYEYYLVTLPE

SEQ ID NO: 11723 - protein, 19 aa, Artificial Sequence
  Cyclic GFR-binding peptide
  MOD_RES (16), (16): Xaa is C or S
YYLVTLPELQVQTPRXQVN

SEQ ID NO: 11724 - protein, 19 aa, Artificial Sequence
  Cyclic GFR-binding peptide
LKPKKRVYEYYLVTLPEHH

SEQ ID NO: 11725 - protein, 15 aa, Artificial Sequence
  Cyclic GFR-binding peptide
  MOD_RES (1), (2): Xaa is C or S
XXVSQDLRSVKIAKV

SEQ ID NO: 11726 - protein, 22 aa, Artificial Sequence
  Cyclic GFR-binding peptide
  MOD_RES (5), (5): Xaa is C or S
SSVKXQPSRVHHEPLPVVYYEY

SEQ ID NO: 11727 - protein, 20 aa, Artificial Sequence
  Cyclic GFR-binding peptide
  MOD_RES (6), (7): Xaa is C or S
YVPKPXXAPTKLRSVKVAKV

SEQ ID NO: 11728 - protein, 28 aa, Artificial Sequence
  Cyclic GFR-binding peptide
  MOD_RES (5), (5): Xaa is C or S
RNVQXRPTQVQLEPLPVVYYEIVRKKPI

SEQ ID NO: 11729 - protein, 23 aa, Artificial Sequence
  Cyclic GFR-binding peptide
  MOD_RES (6), (7): Xaa is C or S
ASAAPXXVPQALRPVQIRKIVGR

SEQ ID NO: 11730 - protein, 19 aa, Artificial Sequence
  Cyclic GFR-binding peptide
  MOD_RES (5), (6): Xaa is C or S
VPKPXXAPTQLRSVKVAKV

SEQ ID NO: 11731 - protein, 26 aa, Artificial Sequence
  Cyclic GFR-binding peptide
  MOD_RES (7), (7): Xaa is C or S
NDEGLEXVPTEEEPLTMLYYRIKPHQ

SEQ ID NO: 11732 - protein, 16 aa, Artificial Sequence
  Cyclic GFR-binding peptide
LRSVKMAKVDENEKVV

SEQ ID NO: 11733 - protein, 21 aa, Artificial Sequence
  Cyclic GFR-binding peptide
  MOD_RES (6), (7): Xaa is C or S
KIPKAXXVPTELSNITMQIMD

SEQ ID NO: 11734 - protein, 18 aa, Artificial Sequence
  Cyclic GFR-binding peptide
QDLRSVKIAKVIGKTPKI

SEQ ID NO: 11735 - protein, 17 aa, Artificial Sequence
  Cyclic GFR-binding peptide
  MOD_RES (3), (4): Xaa is C or S
APXXVPQALRPVQIRKI

SEQ ID NO: 11736 - protein, 18 aa, Artificial Sequence
  Cyclic GFR-binding peptide
TELSNITMQIMDEYDKVV

SEQ ID NO: 11737 - protein, 22 aa, Artificial Sequence
  Cyclic GFR-binding peptide
  MOD_RES (6), (7): Xaa is C or S
SIPKAXXVPTELSNITMQIMDE

SEQ ID NO: 11738 - protein, 14 aa, Artificial Sequence
  Cyclic GFR-binding peptide
  MOD_RES (1), (1): Xaa is C or S
XVPTELSNITMQIM

SEQ ID NO: 11739 - protein, 13 aa, Artificial Sequence
  Cyclic GFR-binding peptide
VSQDLRSVKIAKV

SEQ ID NO: 11740 - protein, 24 aa, Artificial Sequence
  Cyclic GFR-binding peptide
  MOD_RES (6), (7): Xaa is C or S
KIPKAXXVPTELRSVKMAKVDENE

SEQ ID NO: 11741 - protein, 27 aa, Artificial Sequence
  Cyclic GFR-binding peptide
  MOD_RES (6), (7): Xaa is C or S
ASAAPXXVPQALRPVQIRKIVGRKPKV

SEQ ID NO: 11742 - protein, 15 aa, Artificial Sequence
  Cyclic GFR-binding peptide
RPVQIRKIVGRKPKV

SEQ ID NO: 11743 - protein, 14 aa, Artificial Sequence
  Cyclic GFR-binding peptide
  MOD_RES (1), (1): Xaa is C or S
XVPQDLSNITIQIM

SEQ ID NO: 11744 - protein, 22 aa, Artificial Sequence
  Cyclic GFR-binding peptide
  MOD_RES (6), (7): Xaa is C or S
ASASPXXVSQDLSNITIQIMIG

SEQ ID NO: 11745 - protein, 23 aa, Artificial Sequence
  Cyclic GFR-binding peptide
  MOD_RES (6), (7): Xaa is C or S
SIPKAXXVPTELSNITMQIMDEY

SEQ ID NO: 11746 - protein, 14 aa, Artificial Sequence
  Cyclic GFR-binding peptide
  MOD_RES (1), (1): Xaa is C or S
XVPTEEEPLTMLYY

SEQ ID NO: 11747 - protein, 18 aa, Artificial Sequence
  Cyclic GFR-binding peptide
  MOD_RES (5), (5): Xaa is C or S
TKPTXAPTKLRPVQVRKI

SEQ ID NO: 11748 - protein, 17 aa, Artificial Sequence
  Cyclic GFR-binding peptide
ELSNITMQIMDENEKVV

SEQ ID NO: 11749 - protein, 14 aa, Artificial Sequence
  Cyclic GFR-binding peptide
  MOD_RES (1), (1): Xaa is C or S
XVPTELRPVQMRKI

SEQ ID NO: 11750 - protein, 16 aa, Artificial Sequence
  Cyclic GFR-binding peptide
LSNITMQIMDENEKVV

SEQ ID NO: 11751 - protein, 17 aa, Artificial Sequence
  Cyclic GFR-binding peptide
  MOD_RES (3), (4): Xaa is C or S
KPXXAPTQLRPVQVRKI

SEQ ID NO: 11752 - protein, 22 aa, Artificial Sequence
  Cyclic GFR-binding peptide
  MOD_RES (7), (7): Xaa is C or S
HVTKPTXAPTKLRPVQVRKIDD

SEQ ID NO: 11753 - protein, 18 aa, Artificial Sequence
  Cyclic GFR-binding peptide
QDLSNITIQIMIGKTPKI

SEQ ID NO: 11754 - protein, 25 aa, Artificial Sequence
  Cyclic GFR-binding peptide
  MOD_RES (7), (7): Xaa is C or S
HVTKPTXAPTKLRSVKVAKVDDSSN

SEQ ID NO: 11755 - protein, 17 aa, Artificial Sequence
  Cyclic GFR-binding peptide
  MOD_RES (3), (4): Xaa is C or S
APXXVPQALSNITIQIM

SEQ ID NO: 11756 - protein, 18 aa, Artificial Sequence
  Cyclic GFR-binding peptide
TELRSVKMAKVDEYDKVV

SEQ ID NO: 11757 - protein, 22 aa, Artificial Sequence
  Cyclic GFR-binding peptide
  MOD_RES (6), (7): Xaa is C or S
KIPKAXXVPTELRPVQMRKIDE

SEQ ID NO: 11758 - protein, 18 aa, Artificial Sequence
  Cyclic GFR-binding peptide
  MOD_RES (4), (5): Xaa is C or S
PKAXXVPTELSNITMQIM

SEQ ID NO: 11759 - protein, 23 aa, Artificial Sequence
  Cyclic GFR-binding peptide
  MOD_RES (5), (5): Xaa is C or S
SSVKXQPSRVHHEPLTVLYYEYV

SEQ ID NO: 11760 - protein, 17 aa, Artificial Sequence
  Cyclic GFR-binding peptide
  MOD_RES (3), (4): Xaa is C or S
SPXXVSQDLRSVKIAKV

SEQ ID NO: 11761 - protein, 21 aa, Artificial Sequence
  Cyclic GFR-binding peptide
  MOD_RES (7), (7): Xaa is C or S
HVTKPTXAPTKLRPVQVRKID

SEQ ID NO: 11762 - protein, 25 aa, Artificial Sequence
  Cyclic GFR-binding peptide
  MOD_RES (6), (7): Xaa is C or S
SIPKAXXVPTELRPVQMRKIDEYDK

SEQ ID NO: 11763 - protein, 27 aa, Artificial Sequence
  Cyclic GFR-binding peptide
  MOD_RES (6), (7): Xaa is C or S
ASASPXXVSQDLRSVKIAKVIGKTPKI

SEQ ID NO: 11764 - protein, 19 aa, Artificial Sequence
  Cyclic GFR-binding peptide
PTELRSVKMAKVDEYDKVV

SEQ ID NO: 11765 - protein, 13 aa, Artificial Sequence
  Cyclic GFR-binding peptide
VPTELRPVQMRKI

SEQ ID NO: 11766 - protein, 21 aa, Artificial Sequence
  Cyclic GFR-binding peptide
  MOD_RES (6), (7): Xaa is C or S
ASASPXXVSQDLRSVKIAKVI

SEQ ID NO: 11767 - protein, 25 aa, Artificial Sequence
  Cyclic GFR-binding peptide
  MOD_RES (6), (7): Xaa is C or S
SIPKAXXVPTELSNITMQIMDEYDK

SEQ ID NO: 11768 - protein, 19 aa, Artificial Sequence
  Cyclic GFR-binding peptide
  MOD_RES (5), (6): Xaa is C or S
SASPXXVSQDLRSVKIAKV

SEQ ID NO: 11769 - protein, 24 aa, Artificial Sequence
  Cyclic GFR-binding peptide
  MOD_RES (6), (7): Xaa is C or S
ASASPXXVPQDLRSVKIAKVVGRT

SEQ ID NO: 11770 - protein, 19 aa, Artificial Sequence
  Cyclic GFR-binding peptide
QLEPLTVLYYEIVRKKPIF

SEQ ID NO: 11771 - protein, 14 aa, Artificial Sequence
  Cyclic GFR-binding peptide
  MOD_RES (1), (1): Xaa is C or S
XVPTEEEPLPMVYY

SEQ ID NO: 11772 - protein, 19 aa, Artificial Sequence
  Cyclic GFR-binding peptide
  MOD_RES (5), (6): Xaa is C or S
IPKAXXVPTELRSVKMAKV

SEQ ID NO: 11773 - protein, 26 aa, Artificial Sequence
  Cyclic GFR-binding peptide
  MOD_RES (7), (7): Xaa is C or S
HVTKPTXAPTKLRSVKVAKVDDSSNV

SEQ ID NO: 11774 - protein, 24 aa, Artificial Sequence
  Cyclic GFR-binding peptide
  MOD_RES (6), (7): Xaa is C or S
KIPKAXXVPTELSNITMQIMDENE

SEQ ID NO: 11775 - protein, 28 aa, Artificial Sequence
  Cyclic GFR-binding peptide
  MOD_RES (7), (7): Xaa is C or S
NDEGLEXVPTEEEPLPMVYYRIKPHQGQ

SEQ ID NO: 11776 - protein, 27 aa, Artificial Sequence
  Cyclic GFR-binding peptide
  MOD_RES (5), (5): Xaa is C or S
RNVQXRPTQVQLEPLPVVYYEIVRKKP

SEQ ID NO: 11777 - protein, 17 aa, Artificial Sequence
  Cyclic GFR-binding peptide
KLRPVQVRKIDDSSNVI

SEQ ID NO: 11778 - protein, 14 aa, Artificial Sequence
  Cyclic GFR-binding peptide
  MOD_RES (1), (1): Xaa is C or S
XVPQALRSVKIAKV

SEQ ID NO: 11779 - protein, 16 aa, Artificial Sequence
  Cyclic GFR-binding peptide
LRPVQVRKIDDSSNVI

SEQ ID NO: 11780 - protein, 15 aa, Artificial Sequence
  Cyclic GFR-binding peptide
  MOD_RES (1), (2): Xaa is C or S
XXVPTELRPVQMRKI

SEQ ID NO: 11781 - protein, 27 aa, Artificial Sequence
  Cyclic GFR-binding peptide
  MOD_RES (6), (7): Xaa is C or S
ASASPXXVSQDLSNITIQIMIGKTPKI

SEQ ID NO: 11782 - protein, 26 aa, Artificial Sequence
  Cyclic GFR-binding peptide
  MOD_RES (7), (7): Xaa is C or S
HVTKPTXAPTKLRPVQVRKIDDSSNV

SEQ ID NO: 11783 - protein, 14 aa, Artificial Sequence
  Cyclic GFR-binding peptide
  MOD_RES (1), (1): Xaa is C or S
XVSQDLRPVQIRKI

SEQ ID NO: 11784 - protein, 15 aa, Artificial Sequence
  Cyclic GFR-binding peptide
  MOD_RES (2), (2): Xaa is C or S
EXVPTEEEPLTMLYY

SEQ ID NO: 11785 - protein, 16 aa, Artificial Sequence
  Cyclic GFR-binding peptide
  MOD_RES (2), (3): Xaa is C or S
AXXVPTELRSVKMAKV

SEQ ID NO: 11786 - protein, 17 aa, Artificial Sequence
  Cyclic GFR-binding peptide
QLRPVQVRKIDDSSNVI

SEQ ID NO: 11787 - protein, 21 aa, Artificial Sequence
  Cyclic GFR-binding peptide
  MOD_RES (6), (7): Xaa is C or S
ASAAPXXVPQALSNITIQIMV

SEQ ID NO: 11788 - protein, 13 aa, Artificial Sequence
  Cyclic GFR-binding peptide
APTQLRSVKVAKV

SEQ ID NO: 11789 - protein, 23 aa, Artificial Sequence
  Cyclic GFR-binding peptide
  MOD_RES (6), (7): Xaa is C or S
SIPKAXXVPTELRSVKMAKVDEY

SEQ ID NO: 11790 - protein, 19 aa, Artificial Sequence
  Cyclic GFR-binding peptide
PTELSNITMQIMDEYDKVV

SEQ ID NO: 11791 - protein, 15 aa, Artificial Sequence
  Cyclic GFR-binding peptide
  MOD_RES (1), (2): Xaa is C or S
XXAPTQLRSVKVAKV

SEQ ID NO: 11792 - protein, 25 aa, Artificial Sequence
  Cyclic GFR-binding peptide
  MOD_RES (7), (7): Xaa is C or S
HVTKPTXAPTKLSNITVQIMDDSSN

SEQ ID NO: 11793 - protein, 23 aa, Artificial Sequence
  Cyclic GFR-binding peptide
  MOD_RES (5), (5): Xaa is C or S
SSVKXQPSRVHHEPLPVVYYEYV

SEQ ID NO: 11794 - protein, 17 aa, Artificial Sequence
  Cyclic GFR-binding peptide
  MOD_RES (3), (4): Xaa is C or S
SPXXVPQDLSNITIQIM

SEQ ID NO: 11795 - protein, 24 aa, Artificial Sequence
  Cyclic GFR-binding peptide
  MOD_RES (6), (7): Xaa is C or S
ASASPXXVPQDLSNITIQIMVGRT

SEQ ID NO: 11796 - protein, 21 aa, Artificial Sequence
  Cyclic GFR-binding peptide
  MOD_RES (6), (7): Xaa is C or S
KIPKAXXVPTELRPVQMRKID

SEQ ID NO: 11797 - protein, 13 aa, Artificial Sequence
  Cyclic GFR-binding peptide
VPQDLRPVQIRKI

SEQ ID NO: 11798 - protein, 15 aa, Artificial Sequence
  Cyclic GFR-binding peptide
  MOD_RES (1), (2): Xaa is C or S
XXVPQDLRPVQIRKI

SEQ ID NO: 11799 - protein, 15 aa, Artificial Sequence
  Cyclic GFR-binding peptide
  MOD_RES (1), (2): Xaa is C or S
XXVPTELSNITMQIM

SEQ ID NO: 11800 - protein, 17 aa, Artificial Sequence
  Cyclic GFR-binding peptide
DLRPVQIRKIVGRTPKV

SEQ ID NO: 11801 - protein, 13 aa, Artificial Sequence
  Cyclic GFR-binding peptide
VPTEEEPLTMLYY

SEQ ID NO: 11802 - protein, 18 aa, Artificial Sequence
  Cyclic GFR-binding peptide
QALSNITIQIMVGRKPKV

SEQ ID NO: 11803 - protein, 16 aa, Artificial Sequence
  Cyclic GFR-binding peptide
LRPVQIRKIIGKTPKI

SEQ ID NO: 11804 - protein, 22 aa, Artificial Sequence
  Cyclic GFR-binding peptide
  MOD_RES (5), (5): Xaa is C or S
SSVKXQPSRVHHEPLTVLYYEY

SEQ ID NO: 11805 - protein, 15 aa, Artificial Sequence
  Cyclic GFR-binding peptide
RPVQIRKIVGRTPKV

SEQ ID NO: 11806 - protein, 17 aa, Artificial Sequence
  Cyclic GFR-binding peptide
  MOD_RES (3), (4): Xaa is C or S
KPXXAPTQLRSVKVAKV

SEQ ID NO: 11807 - protein, 15 aa, Artificial Sequence
  Cyclic GFR-binding peptide
  MOD_RES (1), (2): Xaa is C or S
XXVPQDLRSVKIAKV

SEQ ID NO: 11808 - protein, 19 aa, Artificial Sequence
  Cyclic GFR-binding peptide
  MOD_RES (5), (6): Xaa is C or S
IPKAXXVPTELRPVQMRKI

SEQ ID NO: 11809 - protein, 26 aa, Artificial Sequence
  Cyclic GFR-binding peptide
  MOD_RES (6), (7): Xaa is C or S
SIPKAXXVPTELRSVKMAKVDEYDKV

SEQ ID NO: 11810 - protein, 18 aa, Artificial Sequence
  Cyclic GFR-binding peptide
HEPLTVLYYEYVRKKPKL

SEQ ID NO: 11811 - protein, 18 aa, Artificial Sequence
  Cyclic GFR-binding peptide
QALRSVKIAKVVGRKPKV

SEQ ID NO: 11812 - protein, 18 aa, Artificial Sequence
  Cyclic GFR-binding peptide
  MOD_RES (5), (5): Xaa is C or S
TKPTXAPTKLRSVKVAKV

SEQ ID NO: 11813 - protein, 17 aa, Artificial Sequence
  Cyclic GFR-binding peptide
  MOD_RES (3), (4): Xaa is C or S
SPXXVSQDLRPVQIRKI

SEQ ID NO: 11814 - protein, 26 aa, Artificial Sequence
  Cyclic GFR-binding peptide
  MOD_RES (6), (7): Xaa is C or S
ASASPXXVSQDLSNITIQIMIGKTPK

SEQ ID NO: 11815 - protein, 19 aa, Artificial Sequence
  Cyclic GFR-binding peptide
  MOD_RES (5), (6): Xaa is C or S
SASPXXVPQDLRPVQIRKI

SEQ ID NO: 11816 - protein, 16 aa, Artificial Sequence
  Cyclic GFR-binding peptide
  MOD_RES (3), (3): Xaa is C or S
PTXAPTKLRSVKVAKV

SEQ ID NO: 11817 - protein, 22 aa, Artificial Sequence
  Cyclic GFR-binding peptide
  MOD_RES (6), (7): Xaa is C or S
ASAAPXXVPQALRPVQIRKIVG

SEQ ID NO: 11818 - protein, 21 aa, Artificial Sequence
  Cyclic GFR-binding peptide
  MOD_RES (6), (7): Xaa is C or S
ASAAPXXVPQALRPVQIRKIV

SEQ ID NO: 11819 - protein, 15 aa, Artificial Sequence
  Cyclic GFR-binding peptide
RSVKMAKVDENEKVV

SEQ ID NO: 11820 - protein, 17 aa, Artificial Sequence
  Cyclic GFR-binding peptide
  MOD_RES (4), (4): Xaa is C or S
GLEXVPTEEEPLTMLYY

SEQ ID NO: 11821 - protein, 16 aa, Artificial Sequence
  Cyclic GFR-binding peptide
  MOD_RES (2), (3): Xaa is C or S
PXXAPTKLRPVQVRKI

SEQ ID NO: 11822 - protein, 13 aa, Artificial Sequence
  Cyclic GFR-binding peptide
VPQDLRSVKIAKV

SEQ ID NO: 11823 - protein, 22 aa, Artificial Sequence
  Cyclic GFR-binding peptide
  MOD_RES (6), (7): Xaa is C or S
ASAAPXXVPQALSNITIQIMVG

SEQ ID NO: 11824 - protein, 15 aa, Artificial Sequence
  Cyclic GFR-binding peptide
RSVKMAKVDEYDKVV

SEQ ID NO: 11825 - protein, 18 aa, Artificial Sequence
  Cyclic GFR-binding peptide
HEPLPVVYYEYVRKKPKL

SEQ ID NO: 11826 - protein, 15 aa, Artificial Sequence
  Cyclic GFR-binding peptide
RPVQVRKIDDSSNVI

SEQ ID NO: 11827 - protein, 26 aa, Artificial Sequence
  Cyclic GFR-binding peptide
  MOD_RES (6), (7): Xaa is C or S
ASASPXXVPQDLSNITIQIMVGRTPK

SEQ ID NO: 11828 - protein, 16 aa, Artificial Sequence
  Cyclic GFR-binding peptide
  MOD_RES (2), (3): Xaa is C or S
PXXAPTKLRSVKVAKV

SEQ ID NO: 11829 - protein, 23 aa, Artificial Sequence
  Cyclic GFR-binding peptide
  MOD_RES (6), (7): Xaa is C or S
YVPKPXXAPTKLRSVKVAKVDDS

SEQ ID NO: 11830 - protein, 17 aa, Artificial Sequence
  Cyclic GFR-binding peptide
  MOD_RES (3), (4): Xaa is C or S
SPXXVSQDLSNITIQIM

SEQ ID NO: 11831 - protein, 16 aa, Artificial Sequence
  Cyclic GFR-binding peptide
  MOD_RES (3), (3): Xaa is C or S
PTXAPTKLRPVQVRKI

SEQ ID NO: 11832 - protein, 18 aa, Artificial Sequence
  Cyclic GFR-binding peptide
QDLRSVKIAKVVGRTPKV

SEQ ID NO: 11833 - protein, 25 aa, Artificial Sequence
  Cyclic GFR-binding peptide
  MOD_RES (6), (7): Xaa is C or S
SIPKAXXVPTELRSVKMAKVDEYDK

SEQ ID NO: 11834 - protein, 15 aa, Artificial Sequence
  Cyclic GFR-binding peptide
  MOD_RES (1), (2): Xaa is C or S
XXVPQALRSVKIAKV

SEQ ID NO: 11835 - protein, 13 aa, Artificial Sequence
  Cyclic GFR-binding peptide
VPTELSNITMQIM

SEQ ID NO: 11836 - protein, 29 aa, Artificial Sequence
  Cyclic GFR-binding peptide
  MOD_RES (5), (5): Xaa is C or S
RNVQXRPTQVQLEPLPVVYYEIVRKKPIF

SEQ ID NO: 11837 - protein, 26 aa, Artificial Sequence
  Cyclic GFR-binding peptide
  MOD_RES (6), (7): Xaa is C or S
YVPKPXXAPTKLRSVKVAKVDDSSNV

SEQ ID NO: 11838 - protein, 15 aa, Artificial Sequence
  Cyclic GFR-binding peptide
  MOD_RES (1), (2): Xaa is C or S
XXVSQDLRPVQIRKI

SEQ ID NO: 11839 - protein, 20 aa, Artificial Sequence
  Cyclic GFR-binding peptide
  MOD_RES (6), (7): Xaa is C or S
YVPKPXXAPTKLRPVQVRKI

SEQ ID NO: 11840 - protein, 22 aa, Artificial Sequence
  Cyclic GFR-binding peptide
  MOD_RES (7), (7): Xaa is C or S
HVTKPTXAPTKLSNITVQIMDD

SEQ ID NO: 11841 - protein, 24 aa, Artificial Sequence
  Cyclic GFR-binding peptide
  MOD_RES (7), (7): Xaa is C or S
HVTKPTXAPTKLRPVQVRKIDDSS

SEQ ID NO: 11842 - protein, 26 aa, Artificial Sequence
  Cyclic GFR-binding peptide
  MOD_RES (6), (7): Xaa is C or S
YVPKPXXAPTKLRPVQVRKIDDSSNV

SEQ ID NO: 11843 - protein, 15 aa, Artificial Sequence
  Cyclic GFR-binding peptide
SNITMQIMDEYDKVV

SEQ ID NO: 11844 - protein, 14 aa, Artificial Sequence
  Cyclic GFR-binding peptide
  MOD_RES (1), (1): Xaa is C or S
XVSQDLRSVKIAKV

SEQ ID NO: 11845 - protein, 27 aa, Artificial Sequence
  Cyclic GFR-binding peptide
  MOD_RES (6), (7): Xaa is C or S
YVPKPXXAPTKLRPVQVRKIDDSSNVI

SEQ ID NO: 11846 - protein, 26 aa, Artificial Sequence
  Cyclic GFR-binding peptide
  MOD_RES (5), (5): Xaa is C or S
RNVQXRPTQVQLEPLPVVYYEIVRKK

SEQ ID NO: 11847 - protein, 13 aa, Artificial Sequence
  Cyclic GFR-binding peptide
VSQDLRPVQIRKI

SEQ ID NO: 11848 - protein, 19 aa, Artificial Sequence
  Cyclic GFR-binding peptide
  MOD_RES (5), (6): Xaa is C or S
SAAPXXVPQALSNITIQIM

SEQ ID NO: 11849 - protein, 18 aa, Artificial Sequence
  Cyclic GFR-binding peptide
QDLSNITIQIMVGRTPKV

SEQ ID NO: 11850 - protein, 26 aa, Artificial Sequence
  Cyclic GFR-binding peptide
  MOD_RES (6), (7): Xaa is C or S
ASAAPXXVPQALRSVKIAKVVGRKPK

SEQ ID NO: 11851 - protein, 17 aa, Artificial Sequence
  Cyclic GFR-binding peptide
  MOD_RES (3), (4): Xaa is C or S
SPXXVPQDLRPVQIRKI

SEQ ID NO: 11852 - protein, 13 aa, Artificial Sequence
  Cyclic GFR-binding peptide
VPTEEEPLPMVYY

SEQ ID NO: 11853 - protein, 22 aa, Artificial Sequence
  Cyclic GFR-binding peptide
  MOD_RES (6), (7): Xaa is C or S
SIPKAXXVPTELRPVQMRKIDE

SEQ ID NO: 11854 - protein, 13 aa, Artificial Sequence
  Cyclic GFR-binding peptide
VPQALRSVKIAKV

SEQ ID NO: 11855 - protein, 19 aa, Artificial Sequence
  Cyclic GFR-binding peptide
PTELRPVQMRKIDENEKVV

SEQ ID NO: 11856 - protein, 19 aa, Artificial Sequence
  Cyclic GFR-binding peptide
  MOD_RES (5), (6): Xaa is C or S
SASPXXVPQDLRSVKIAKV

SEQ ID NO: 11857 - protein, 26 aa, Artificial Sequence
  Cyclic GFR-binding peptide
  MOD_RES (6), (7): Xaa is C or S
TVPKPXXAPTQLRPVQVRKIDDSSNV

SEQ ID NO: 11858 - protein, 21 aa, Artificial Sequence
  Cyclic GFR-binding peptide
  MOD_RES (5), (5): Xaa is C or S
SSVKXQPSRVHHEPLTVLYYE

SEQ ID NO: 11859 - protein, 21 aa, Artificial Sequence
  Cyclic GFR-binding peptide
  MOD_RES (7), (7): Xaa is C or S
HVTKPTXAPTKLSNITVQIMD

SEQ ID NO: 11860 - protein, 17 aa, Artificial Sequence
  Cyclic GFR-binding peptide
  MOD_RES (4), (4): Xaa is C or S
GLEXVPTEEEPLPMVYY

SEQ ID NO: 11861 - protein, 23 aa, Artificial Sequence
  Cyclic GFR-binding peptide
  MOD_RES (6), (7): Xaa is C or S
YVPKPXXAPTKLSNITVQIMDDS

SEQ ID NO: 11862 - protein, 25 aa, Artificial Sequence
  Cyclic GFR-binding peptide
  MOD_RES (6), (7): Xaa is C or S
ASASPXXVSQDLRPVQIRKIIGKTP

SEQ ID NO: 11863 - protein, 20 aa, Artificial Sequence
  Cyclic GFR-binding peptide
  MOD_RES (6), (7): Xaa is C or S
SIPKAXXVPTELSNITMQIM

SEQ ID NO: 11864 - protein, 21 aa, Artificial Sequence
  Cyclic GFR-binding peptide
PTEEEPLTMLYYRIKPHQGQH

SEQ ID NO: 11865 - protein, 17 aa, Artificial Sequence
  Cyclic GFR-binding peptide
  MOD_RES (3), (4): Xaa is C or S
KPXXAPTKLRSVKVAKV

SEQ ID NO: 11866 - protein, 15 aa, Artificial Sequence
  Cyclic GFR-binding peptide
  MOD_RES (2), (2): Xaa is C or S
TXAPTKLSNITVQIM

SEQ ID NO: 11867 - protein, 25 aa, Artificial Sequence
  Cyclic GFR-binding peptide
  MOD_RES (5), (5): Xaa is C or S
SSVKXQPSRVHHEPLPVVYYEYVRK

SEQ ID NO: 11868 - protein, 20 aa, Artificial Sequence
  Cyclic GFR-binding peptide
  MOD_RES (6), (7): Xaa is C or S
ASAAPXXVPQALRSVKIAKV

SEQ ID NO: 11869 - protein, 27 aa, Artificial Sequence
  Cyclic GFR-binding peptide
  MOD_RES (6), (7): Xaa is C or S
YVPKPXXAPTKLSNITVQIMDDSSNVI

SEQ ID NO: 11870 - protein, 23 aa, Artificial Sequence
  Cyclic GFR-binding peptide
  MOD_RES (6), (7): Xaa is C or S
ASASPXXVPQDLRPVQIRKIVGR

SEQ ID NO: 11871 - protein, 27 aa, Artificial Sequence
  Cyclic GFR-binding peptide
  MOD_RES (5), (5): Xaa is C or S
RNVQXRPTQVQLEPLTVLYYEIVRKKP

SEQ ID NO: 11872 - protein, 22 aa, Artificial Sequence
  Cyclic GFR-binding peptide
  MOD_RES (6), (7): Xaa is C or S
ASASPXXVPQDLRPVQIRKIVG

SEQ ID NO: 11873 - protein, 23 aa, Artificial Sequence
  Cyclic GFR-binding peptide
  MOD_RES (6), (7): Xaa is C or S
TVPKPXXAPTQLSNITVQIMDDS

SEQ ID NO: 11874 - protein, 17 aa, Artificial Sequence
  Cyclic GFR-binding peptide
DLRPVQIRKIIGKTPKI

SEQ ID NO: 11875 - protein, 20 aa, Artificial Sequence
  Cyclic GFR-binding peptide
  MOD_RES (6), (7): Xaa is C or S
YVPKPXXAPTKLSNITVQIM

SEQ ID NO: 11876 - protein, 18 aa, Artificial Sequence
  Cyclic GFR-binding peptide
  MOD_RES (4), (5): Xaa is C or S
ASPXXVPQDLRPVQIRKI

SEQ ID NO: 11877 - protein, 17 aa, Artificial Sequence
  Cyclic GFR-binding peptide
  MOD_RES (2), (2): Xaa is C or S
QXRPTQVQLEPLTVLYY

SEQ ID NO: 11878 - protein, 23 aa, Artificial Sequence
  Cyclic GFR-binding peptide
  MOD_RES (7), (7): Xaa is C or S
HVTKPTXAPTKLRPVQVRKIDDS

SEQ ID NO: 11879 - protein, 18 aa, Artificial Sequence
  Cyclic GFR-binding peptide
  MOD_RES (3), (3): Xaa is C or S
VQXRPTQVQLEPLTVLYY

SEQ ID NO: 11880 - protein, 23 aa, Artificial Sequence
  Cyclic GFR-binding peptide
  MOD_RES (6), (7): Xaa is C or S
KIPKAXXVPTELRPVQMRKIDEN

SEQ ID NO: 11881 - protein, 18 aa, Artificial Sequence
  Cyclic GFR-binding peptide
TKLSNITVQIMDDSSNVI

SEQ ID NO: 11882 - protein, 20 aa, Artificial Sequence
  Cyclic GFR-binding peptide
  MOD_RES (5), (5): Xaa is C or S
RNVQXRPTQVQLEPLTVLYY

SEQ ID NO: 11883 - protein, 16 aa, Artificial Sequence
  Cyclic GFR-binding peptide
LRSVKIAKVVGRTPKV

SEQ ID NO: 11884 - protein, 22 aa, Artificial Sequence
  Cyclic GFR-binding peptide
  MOD_RES (6), (7): Xaa is C or S
YVPKPXXAPTKLSNITVQIMDD

SEQ ID NO: 11885 - protein, 17 aa, Artificial Sequence
  Cyclic GFR-binding peptide
EPLTMLYYRIKPHQGQH

SEQ ID NO: 11886 - protein, 14 aa, Artificial Sequence
  Cyclic GFR-binding peptide
  MOD_RES (1), (1): Xaa is C or S
XAPTQLSNITVQIM

SEQ ID NO: 11887 - protein, 18 aa, Artificial Sequence
  Cyclic GFR-binding peptide
TQLSNITVQIMDDSSNVI

SEQ ID NO: 11888 - protein, 27 aa, Artificial Sequence
  Cyclic GFR-binding peptide
  MOD_RES (6), (7): Xaa is C or S
ASASPXXVPQDLSNITIQIMVGRTPKV

SEQ ID NO: 11889 - protein, 19 aa, Artificial Sequence
  Cyclic GFR-binding peptide
  MOD_RES (5), (6): Xaa is C or S
SASPXXVPQDLSNITIQIM

SEQ ID NO: 11890 - protein, 16 aa, Artificial Sequence
  Cyclic GFR-binding peptide
LRPVQIRKIVGRTPKV

SEQ ID NO: 11891 - protein, 17 aa, Artificial Sequence
  Cyclic GFR-binding peptide
  MOD_RES (3), (4): Xaa is C or S
APXXVPQALRSVKIAKV

SEQ ID NO: 11892 - protein, 13 aa, Artificial Sequence
  Cyclic GFR-binding peptide
SRVHHEPLTVLYY

SEQ ID NO: 11893 - protein, 19 aa, Artificial Sequence
  Cyclic GFR-binding peptide
  MOD_RES (5), (6): Xaa is C or S
VPKPXXAPTQLSNITVQIM

SEQ ID NO: 11894 - protein, 22 aa, Artificial Sequence
  Cyclic GFR-binding peptide
  MOD_RES (6), (7): Xaa is C or S
YVPKPXXAPTKLRSVKVAKVDD

SEQ ID NO: 11895 - protein, 27 aa, Artificial Sequence
  Cyclic GFR-binding peptide
  MOD_RES (6), (7): Xaa is C or S
ASASPXXVPQDLRPVQIRKIVGRTPKV

SEQ ID NO: 11896 - protein, 22 aa, Artificial Sequence
  Cyclic GFR-binding peptide
  MOD_RES (6), (7): Xaa is C or S
ASASPXXVPQDLRSVKIAKVVG

SEQ ID NO: 11897 - protein, 20 aa, Artificial Sequence
  Cyclic GFR-binding peptide
  MOD_RES (6), (7): Xaa is C or S
TVPKPXXAPTQLRPVQVRKI

SEQ ID NO: 11898 - protein, 16 aa, Artificial Sequence
  Cyclic GFR-binding peptide
  MOD_RES (2), (3): Xaa is C or S
PXXAPTKLSNITVQIM

SEQ ID NO: 11899 - protein, 19 aa, Artificial Sequence
  Cyclic GFR-binding peptide
  MOD_RES (5), (6): Xaa is C or S
VPKPXXAPTQLRPVQVRKI

SEQ ID NO: 11900 - protein, 20 aa, Artificial Sequence
  Cyclic GFR-binding peptide
  MOD_RES (5), (5): Xaa is C or S
SSVKXQPSRVHHEPLTVLYY

SEQ ID NO: 11901 - protein, 26 aa, Artificial Sequence
  Cyclic GFR-binding peptide
  MOD_RES (6), (7): Xaa is C or S
TVPKPXXAPTQLRSVKVAKVDDSSNV

SEQ ID NO: 11902 - protein, 15 aa, Artificial Sequence
  Cyclic GFR-binding peptide
  MOD_RES (1), (2): Xaa is C or S
XXAPTQLSNITVQIM

SEQ ID NO: 11903 - protein, 16 aa, Artificial Sequence
  Cyclic GFR-binding peptide
LRPVQIRKIVGRKPKV

SEQ ID NO: 11904 - protein, 16 aa, Artificial Sequence
  Cyclic GFR-binding peptide
  MOD_RES (2), (3): Xaa is C or S
PXXVSQDLRPVQIRKI

SEQ ID NO: 11905 - protein, 13 aa, Artificial Sequence
  Cyclic GFR-binding peptide
VSQDLSNITIQIM

SEQ ID NO: 11906 - protein, 27 aa, Artificial Sequence
  Cyclic GFR-binding peptide
  MOD_RES (7), (7): Xaa is C or S
HVTKPTXAPTKLRSVKVAKVDDSSNVI

SEQ ID NO: 11907 - protein, 18 aa, Artificial Sequence
  Cyclic GFR-binding peptide
  MOD_RES (3), (3): Xaa is C or S
VQXRPTQVQLEPLPVVYY

SEQ ID NO: 11908 - protein, 19 aa, Artificial Sequence
  Cyclic GFR-binding peptide
  MOD_RES (4), (4): Xaa is C or S
SVKXQPSRVHHEPLPVVYY

SEQ ID NO: 11909 - protein, 25 aa, Artificial Sequence
  Cyclic GFR-binding peptide
  MOD_RES (7), (7): Xaa is C or S
NDEGLEXVPTEEEPLPMVYYRIKPH

SEQ ID NO: 11910 - protein, 15 aa, Artificial Sequence
  Cyclic GFR-binding peptide
RPVQMRKIDENEKVV

SEQ ID NO: 11911 - protein, 23 aa, Artificial Sequence
  Cyclic GFR-binding peptide
  MOD_RES (6), (7): Xaa is C or S
TVPKPXXAPTQLRPVQVRKIDDS

SEQ ID NO: 11912 - protein, 19 aa, Artificial Sequence
  Cyclic GFR-binding peptide
PTKLRPVQVRKIDDSSNVI

SEQ ID NO: 11913 - protein, 18 aa, Artificial Sequence
  Cyclic GFR-binding peptide
  MOD_RES (4), (5): Xaa is C or S
ASPXXVPQDLSNITIQIM

SEQ ID NO: 11914 - protein, 19 aa, Artificial Sequence
  Cyclic GFR-binding peptide
PTQLRPVQVRKIDDSSNVI

SEQ ID NO: 11915 - protein, 16 aa, Artificial Sequence
  Cyclic GFR-binding peptide
  MOD_RES (3), (3): Xaa is C or S
PTXAPTKLSNITVQIM

SEQ ID NO: 11916 - protein, 16 aa, Artificial Sequence
  Cyclic GFR-binding peptide
LSNITMQIMDEYDKVV

SEQ ID NO: 11917 - protein, 18 aa, Artificial Sequence
  Cyclic GFR-binding peptide
EEPLTMLYYRIKPHQGQH

SEQ ID NO: 11918 - protein, 22 aa, Artificial Sequence
  Cyclic GFR-binding peptide
  MOD_RES (6), (7): Xaa is C or S
YVPKPXXAPTKLRPVQVRKIDD

SEQ ID NO: 11919 - protein, 13 aa, Artificial Sequence
  Cyclic GFR-binding peptide
VPQALRPVQIRKI

SEQ ID NO: 11920 - protein, 26 aa, Artificial Sequence
  Cyclic GFR-binding peptide
  MOD_RES (6), (7): Xaa is C or S
KIPKAXXVPTELSNITMQIMDENEKV

SEQ ID NO: 11921 - protein, 17 aa, Artificial Sequence
  Cyclic GFR-binding peptide
ELRSVKMAKVDEYDKVV

SEQ ID NO: 11922 - protein, 23 aa, Artificial Sequence
  Cyclic GFR-binding peptide
  MOD_RES (6), (7): Xaa is C or S
YVPKPXXAPTKLRPVQVRKIDDS

SEQ ID NO: 11923 - protein, 19 aa, Artificial Sequence
  Cyclic GFR-binding peptide
  MOD_RES (5), (6): Xaa is C or S
VPKPXXAPTKLSNITVQIM

SEQ ID NO: 11924 - protein, 23 aa, Artificial Sequence
  Cyclic GFR-binding peptide
  MOD_RES (6), (7): Xaa is C or S
ASASPXXVPQDLRSVKIAKVVGR

SEQ ID NO: 11925 - protein, 18 aa, Artificial Sequence
  Cyclic GFR-binding peptide
  MOD_RES (4), (5): Xaa is C or S
PKPXXAPTQLRSVKVAKV

SEQ ID NO: 11926 - protein, 19 aa, Artificial Sequence
  Cyclic GFR-binding peptide
PTKLSNITVQIMDDSSNVI

SEQ ID NO: 11927 - protein, 27 aa, Artificial Sequence
  Cyclic GFR-binding peptide
  MOD_RES (6), (7): Xaa is C or S
TVPKPXXAPTQLRPVQVRKIDDSSNVI

SEQ ID NO: 11928 - protein, 17 aa, Artificial Sequence
  Cyclic GFR-binding peptide
ELRPVQMRKIDEYDKVV

SEQ ID NO: 11929 - protein, 19 aa, Artificial Sequence
  Cyclic GFR-binding peptide
PTQLSNITVQIMDDSSNVI

SEQ ID NO: 11930 - protein, 20 aa, Artificial Sequence
  Cyclic GFR-binding peptide
  MOD_RES (6), (7): Xaa is C or S
ASASPXXVSQDLSNITIQIM

SEQ ID NO: 11931 - protein, 27 aa, Artificial Sequence
  Cyclic GFR-binding peptide
  MOD_RES (6), (7): Xaa is C or S
SIPKAXXVPTELRSVKMAKVDEYDKVV

SEQ ID NO: 11932 - protein, 20 aa, Artificial Sequence
  Cyclic GFR-binding peptide
  MOD_RES (7), (7): Xaa is C or S
HVTKPTXAPTKLRPVQVRKI

SEQ ID NO: 11933 - protein, 29 aa, Artificial Sequence
  Cyclic GFR-binding peptide
  MOD_RES (5), (5): Xaa is C or S
RNVQXRPTQVQLEPLTVLYYEIVRKKPIF

SEQ ID NO: 11934 - protein, 26 aa, Artificial Sequence
  Cyclic GFR-binding peptide
  MOD_RES (6), (7): Xaa is C or S
ASAAPXXVPQALSNITIQIMVGRKPK

SEQ ID NO: 11935 - protein, 16 aa, Artificial Sequence
  Cyclic GFR-binding peptide
  MOD_RES (2), (3): Xaa is C or S
PXXAPTQLRPVQVRKI

SEQ ID NO: 11936 - protein, 24 aa, Artificial Sequence
  Cyclic GFR-binding peptide
  MOD_RES (6), (7): Xaa is C or S
ASASPXXVSQDLRPVQIRKIIGKT

SEQ ID NO: 11937 - protein, 16 aa, Artificial Sequence
  Cyclic GFR-binding peptide
LRSVKIAKVVGRKPKV

SEQ ID NO: 11938 - protein, 17 aa, Artificial Sequence
  Cyclic GFR-binding peptide
  MOD_RES (2), (2): Xaa is C or S
QXRPTQVQLEPLPVVYY

SEQ ID NO: 11939 - protein, 25 aa, Artificial Sequence
  Cyclic GFR-binding peptide
  MOD_RES (6), (7): Xaa is C or S
TVPKPXXAPTQLRPVQVRKIDDSSN

SEQ ID NO: 11940 - protein, 17 aa, Artificial Sequence
  Cyclic GFR-binding peptide
DLSNITIQIMIGKTPKI

SEQ ID NO: 11941 - protein, 15 aa, Artificial Sequence
  Cyclic GFR-binding peptide
  MOD_RES (2), (2): Xaa is C or S
TXAPTKLRPVQVRKI

SEQ ID NO: 11942 - protein, 14 aa, Artificial Sequence
  Cyclic GFR-binding peptide
  MOD_RES (1), (1): Xaa is C or S
XVPQDLRSVKIAKV

SEQ ID NO: 11943 - protein, 18 aa, Artificial Sequence
  Cyclic GFR-binding peptide
LEPLPVVYYEIVRKKPIF

SEQ ID NO: 11944 - protein, 27 aa, Artificial Sequence
  Cyclic GFR-binding peptide
  MOD_RES (6), (7): Xaa is C or S
TVPKPXXAPTQLRSVKVAKVDDSSNVI

SEQ ID NO: 11945 - protein, 29 aa, Artificial Sequence
  Cyclic GFR-binding peptide
  MOD_RES (5), (5): Xaa is C or S
SSVKXQPSRVHHEPLPVVYYEYVRKKPKL

SEQ ID NO: 11946 - protein, 13 aa, Artificial Sequence
  Cyclic GFR-binding peptide
VPQALSNITIQIM

SEQ ID NO: 11947 - protein, 21 aa, Artificial Sequence
  Cyclic GFR-binding peptide
QVQLEPLPVVYYEIVRKKPIF

SEQ ID NO: 11948 - protein, 14 aa, Artificial Sequence
  Cyclic GFR-binding peptide
  MOD_RES (1), (1): Xaa is C or S
XAPTQLRPVQVRKI

SEQ ID NO: 11949 - protein, 20 aa, Artificial Sequence
  Cyclic GFR-binding peptide
VHHEPLTVLYYEYVRKKPKL

SEQ ID NO: 11950 - protein, 19 aa, Artificial Sequence
  Cyclic GFR-binding peptide
  MOD_RES (5), (6): Xaa is C or S
SAAPXXVPQALRPVQIRKI

SEQ ID NO: 11951 - protein, 15 aa, Artificial Sequence
  Cyclic GFR-binding peptide
RPVQMRKIDEYDKVV

SEQ ID NO: 11952 - protein, 23 aa, Artificial Sequence
  Cyclic GFR-binding peptide
  MOD_RES (6), (7): Xaa is C or S
KIPKAXXVPTELSNITMQIMDEN

SEQ ID NO: 11953 - protein, 16 aa, Artificial Sequence
  Cyclic GFR-binding peptide
LRSVKIAKVIGKTPKI

SEQ ID NO: 11954 - protein, 26 aa, Artificial Sequence
  Cyclic GFR-binding peptide
  MOD_RES (6), (7): Xaa is C or S
TVPKPXXAPTQLSNITVQIMDDSSNV

SEQ ID NO: 11955 - protein, 23 aa, Artificial Sequence
  Cyclic GFR-binding peptide
  MOD_RES (5), (5): Xaa is C or S
RNVQXRPTQVQLEPLTVLYYEIV

SEQ ID NO: 11956 - protein, 17 aa, Artificial Sequence
  Cyclic GFR-binding peptide
EPLPVVYYEYVRKKPKL

SEQ ID NO: 11957 - protein, 21 aa, Artificial Sequence
  Cyclic GFR-binding peptide
  MOD_RES (7), (7): Xaa is C or S
NDEGLEXVPTEEEPLPMVYYR

SEQ ID NO: 11958 - protein, 21 aa, Artificial Sequence
  Cyclic GFR-binding peptide
  MOD_RES (6), (7): Xaa is C or S
TVPKPXXAPTQLRPVQVRKID

SEQ ID NO: 11959 - protein, 20 aa, Artificial Sequence
  Cyclic GFR-binding peptide
  MOD_RES (6), (7): Xaa is C or S
SIPKAXXVPTELRPVQMRKI

SEQ ID NO: 11960 - protein, 19 aa, Artificial Sequence
  Cyclic GFR-binding peptide
HHEPLPVVYYEYVRKKPKL

SEQ ID NO: 11961 - protein, 15 aa, Artificial Sequence
  Cyclic GFR-binding peptide
RSVKIAKVVGRTPKV

SEQ ID NO: 11962 - protein, 22 aa, Artificial Sequence
  Cyclic GFR-binding peptide
  MOD_RES (7), (7): Xaa is C or S
NDEGLEXVPTEEEPLPMVYYRI

SEQ ID NO: 11963 - protein, 22 aa, Artificial Sequence
  Cyclic GFR-binding peptide
  MOD_RES (6), (7): Xaa is C or S
TVPKPXXAPTQLRPVQVRKIDD

SEQ ID NO: 11964 - protein, 15 aa, Artificial Sequence
  Cyclic GFR-binding peptide
RSVKVAKVDDSSNVI

SEQ ID NO: 11965 - protein, 25 aa, Artificial Sequence
  Cyclic GFR-binding peptide
  MOD_RES (6), (7): Xaa is C or S
KIPKAXXVPTELRPVQMRKIDENEK

SEQ ID NO: 11966 - protein, 21 aa, Artificial Sequence
  Cyclic GFR-binding peptide
  MOD_RES (6), (7): Xaa is C or S
SIPKAXXVPTELRPVQMRKID

SEQ ID NO: 11967 - protein, 15 aa, Artificial Sequence
  Cyclic GFR-binding peptide
  MOD_RES (1), (2): Xaa is C or S
XXAPTKLRPVQVRKI

SEQ ID NO: 11968 - protein, 18 aa, Artificial Sequence
  Cyclic GFR-binding peptide
QALRPVQIRKIVGRKPKV

SEQ ID NO: 11969 - protein, 19 aa, Artificial Sequence
  Cyclic GFR-binding peptide
  MOD_RES (6), (6): Xaa is C or S
VTKPTXAPTKLSNITVQIM

SEQ ID NO: 11970 - protein, 23 aa, Artificial Sequence
  Cyclic GFR-binding peptide
  MOD_RES (7), (7): Xaa is C or S
HVTKPTXAPTKLSNITVQIMDDS

SEQ ID NO: 11971 - protein, 19 aa, Artificial Sequence
  Cyclic GFR-binding peptide
PQDLSNITIQIMVGRTPKV

SEQ ID NO: 11972 - protein, 25 aa, Artificial Sequence
  Cyclic GFR-binding peptide
  MOD_RES (6), (7): Xaa is C or S
ASASPXXVPQDLRPVQIRKIVGRTP

SEQ ID NO: 11973 - protein, 24 aa, Artificial Sequence
  Cyclic GFR-binding peptide
  MOD_RES (6), (7): Xaa is C or S
TVPKPXXAPTQLRSVKVAKVDDSS

SEQ ID NO: 11974 - protein, 22 aa, Artificial Sequence
  Cyclic GFR-binding peptide
  MOD_RES (6), (7): Xaa is C or S
TVPKPXXAPTQLRSVKVAKVDD

SEQ ID NO: 11975 - protein, 18 aa, Artificial Sequence
  Cyclic GFR-binding peptide
  MOD_RES (4), (5): Xaa is C or S
PKAXXVPTELRPVQMRKI

SEQ ID NO: 11976 - protein, 21 aa, Artificial Sequence
  Cyclic GFR-binding peptide
  MOD_RES (6), (7): Xaa is C or S
YVPKPXXAPTKLSNITVQIMD

SEQ ID NO: 11977 - protein, 20 aa, Artificial Sequence
  Cyclic GFR-binding peptide
TEEEPLTMLYYRIKPHQGQH

SEQ ID NO: 11978 - protein, 20 aa, Artificial Sequence
  Cyclic GFR-binding peptide
  MOD_RES (6), (7): Xaa is C or S
KIPKAXXVPTELSNITMQIM

SEQ ID NO: 11979 - protein, 18 aa, Artificial Sequence
  Cyclic GFR-binding peptide
  MOD_RES (4), (5): Xaa is C or S
ASPXXVSQDLRPVQIRKI

SEQ ID NO: 11980 - protein, 15 aa, Artificial Sequence
  Cyclic GFR-binding peptide
  MOD_RES (1), (2): Xaa is C or S
XXAPTKLSNITVQIM

SEQ ID NO: 11981 - protein, 20 aa, Artificial Sequence
  Cyclic GFR-binding peptide
  MOD_RES (6), (7): Xaa is C or S
ASASPXXVSQDLRPVQIRKI

SEQ ID NO: 11982 - protein, 13 aa, Artificial Sequence
  Cyclic GFR-binding peptide
VPQDLSNITIQIM

SEQ ID NO: 11983 - protein, 20 aa, Artificial Sequence
  Cyclic GFR-binding peptide
  MOD_RES (5), (5): Xaa is C or S
RNVQXRPTQVQLEPLPVVYY

SEQ ID NO: 11984 - protein, 19 aa, Artificial Sequence
  Cyclic GFR-binding peptide
  MOD_RES (5), (6): Xaa is C or S
VPKPXXAPTKLRPVQVRKI

SEQ ID NO: 11985 - protein, 22 aa, Artificial Sequence
  Cyclic GFR-binding peptide
  MOD_RES (6), (7): Xaa is C or S
TVPKPXXAPTQLSNITVQIMDD

SEQ ID NO: 11986 - protein, 17 aa, Artificial Sequence
  Cyclic GFR-binding peptide
ALRSVKIAKVVGRKPKV

SEQ ID NO: 11987 - protein, 17 aa, Artificial Sequence
  Cyclic GFR-binding peptide
  MOD_RES (4), (4): Xaa is C or S
KPTXAPTKLRSVKVAKV

SEQ ID NO: 11988 - protein, 23 aa, Artificial Sequence
  Cyclic GFR-binding peptide
  MOD_RES (7), (7): Xaa is C or S
NDEGLEXVPTEEEPLPMVYYRIK

SEQ ID NO: 11989 - protein, 22 aa, Artificial Sequence
  Cyclic GFR-binding peptide
  MOD_RES (6), (7): Xaa is C or S
ASASPXXVPQDLSNITIQIMVG

SEQ ID NO: 11990 - protein, 21 aa, Artificial Sequence
  Cyclic GFR-binding peptide
  MOD_RES (6), (7): Xaa is C or S
SIPKAXXVPTELRSVKMAKVD

SEQ ID NO: 11991 - protein, 20 aa, Artificial Sequence
  Cyclic GFR-binding peptide
  MOD_RES (6), (7): Xaa is C or S
KIPKAXXVPTELRPVQMRKI

SEQ ID NO: 11992 - protein, 18 aa, Artificial Sequence
  Cyclic GFR-binding peptide
  MOD_RES (4), (5): Xaa is C or S
ASPXXVSQDLSNITIQIM

SEQ ID NO: 11993 - protein, 26 aa, Artificial Sequence
  Cyclic GFR-binding peptide
  MOD_RES (6), (7): Xaa is C or S
KIPKAXXVPTELRSVKMAKVDENEKV

SEQ ID NO: 11994 - protein, 24 aa, Artificial Sequence
  Cyclic GFR-binding peptide
  MOD_RES (6), (7): Xaa is C or S
TVPKPXXAPTQLSNITVQIMDDSS

SEQ ID NO: 11995 - protein, 26 aa, Artificial Sequence
  Cyclic GFR-binding peptide
  MOD_RES (5), (5): Xaa is C or S
SSVKXQPSRVHHEPLTVLYYEYVRKK

SEQ ID NO: 11996 - protein, 17 aa, Artificial Sequence
  Cyclic GFR-binding peptide
  MOD_RES (3), (4): Xaa is C or S
KAXXVPTELRPVQMRKI

SEQ ID NO: 11997 - protein, 15 aa, Artificial Sequence
  Cyclic GFR-binding peptide
  MOD_RES (2), (2): Xaa is C or S
EXVPTEEEPLPMVYY

SEQ ID NO: 11998 - protein, 21 aa, Artificial Sequence
  Cyclic GFR-binding peptide
  MOD_RES (6), (7): Xaa is C or S
ASASPXXVSQDLRPVQIRKII

SEQ ID NO: 11999 - protein, 21 aa, Artificial Sequence
  Cyclic GFR-binding peptide
  MOD_RES (6), (7): Xaa is C or S
TVPKPXXAPTQLRSVKVAKVD

SEQ ID NO: 12000 - protein, 21 aa, Artificial Sequence
  Cyclic GFR-binding peptide
  MOD_RES (6), (7): Xaa is C or S
ASASPXXVPQDLRSVKIAKVV

SEQ ID NO: 12001 - protein, 17 aa, Artificial Sequence
  Cyclic GFR-binding peptide
  MOD_RES (2), (2): Xaa is C or S
KXQPSRVHHEPLTVLYY

SEQ ID NO: 12002 - protein, 25 aa, Artificial Sequence
  Cyclic GFR-binding peptide
  MOD_RES (5), (5): Xaa is C or S
SSVKXQPSRVHHEPLTVLYYEYVRK

SEQ ID NO: 12003 - protein, 17 aa, Artificial Sequence
  Cyclic GFR-binding peptide
ELRSVKMAKVDENEKVV

SEQ ID NO: 12004 - protein, 17 aa, Artificial Sequence
  Cyclic GFR-binding peptide
EPLTVLYYEIVRKKPIF

SEQ ID NO: 12005 - protein, 15 aa, Artificial Sequence
  Cyclic GFR-binding peptide
  MOD_RES (1), (2): Xaa is C or S
XXAPTQLRPVQVRKI

SEQ ID NO: 12006 - protein, 19 aa, Artificial Sequence
  Cyclic GFR-binding peptide
PQALRSVKIAKVVGRKPKV

SEQ ID NO: 12007 - protein, 13 aa, Artificial Sequence
  Cyclic GFR-binding peptide
VPTELRSVKMAKV

SEQ ID NO: 12008 - protein, 27 aa, Artificial Sequence
  Cyclic GFR-binding peptide
  MOD_RES (6), (7): Xaa is C or S
KIPKAXXVPTELSNITMQIMDENEKVV

SEQ ID NO: 12009 - protein, 22 aa, Artificial Sequence
  Cyclic GFR-binding peptide
  MOD_RES (6), (7): Xaa is C or S
ASASPXXVSQDLRPVQIRKIIG

SEQ ID NO: 12010 - protein, 27 aa, Artificial Sequence
  Cyclic GFR-binding peptide
  MOD_RES (5), (5): Xaa is C or S
SSVKXQPSRVHHEPLPVVYYEYVRKKP

SEQ ID NO: 12011 - protein, 19 aa, Artificial Sequence
  Cyclic GFR-binding peptide
  MOD_RES (4), (4): Xaa is C or S
SVKXQPSRVHHEPLTVLYY

SEQ ID NO: 12012 - protein, 19 aa, Artificial Sequence
  Cyclic GFR-binding peptide
PTELSNITMQIMDENEKVV

SEQ ID NO: 12013 - protein, 17 aa, Artificial Sequence
  Cyclic GFR-binding peptide
DLSNITIQIMVGRTPKV

SEQ ID NO: 12014 - protein, 16 aa, Artificial Sequence
  Cyclic GFR-binding peptide
  MOD_RES (2), (3): Xaa is C or S
PXXAPTQLSNITVQIM

SEQ ID NO: 12015 - protein, 20 aa, Artificial Sequence
  Cyclic GFR-binding peptide
  MOD_RES (7), (7): Xaa is C or S
HVTKPTXAPTKLSNITVQIM

SEQ ID NO: 12016 - protein, 14 aa, Artificial Sequence
  Cyclic GFR-binding peptide
  MOD_RES (1), (1): Xaa is C or S
XAPTKLRPVQVRKI

SEQ ID NO: 12017 - protein, 17 aa, Artificial Sequence
  Cyclic GFR-binding peptide
QLSNITVQIMDDSSNVI

SEQ ID NO: 12018 - protein, 17 aa, Artificial Sequence
  Cyclic GFR-binding peptide
EPLPMVYYRIKPHQGQH

SEQ ID NO: 12019 - protein, 15 aa, Artificial Sequence
  Cyclic GFR-binding peptide
RSVKIAKVIGKTPKI

SEQ ID NO: 12020 - protein, 26 aa, Artificial Sequence
  Cyclic GFR-binding peptide
  MOD_RES (7), (7): Xaa is C or S
NDEGLEXVPTEEEPLPMVYYRIKPHQ

SEQ ID NO: 12021 - protein, 15 aa, Artificial Sequence
  Cyclic GFR-binding peptide
  MOD_RES (2), (2): Xaa is C or S
TXAPTKLRSVKVAKV

SEQ ID NO: 12022 - protein, 26 aa, Artificial Sequence
  Cyclic GFR-binding peptide
  MOD_RES (7), (7): Xaa is C or S
HVTKPTXAPTKLSNITVQIMDDSSNV

SEQ ID NO: 12023 - protein, 22 aa, Artificial Sequence
  Cyclic GFR-binding peptide
  MOD_RES (6), (7): Xaa is C or S
ASASPXXVSQDLRSVKIAKVIG

SEQ ID NO: 12024 - protein, 26 aa, Artificial Sequence
  Cyclic GFR-binding peptide
  MOD_RES (6), (7): Xaa is C or S
YVPKPXXAPTKLSNITVQIMDDSSNV

SEQ ID NO: 12025 - protein, 24 aa, Artificial Sequence
  Cyclic GFR-binding peptide
  MOD_RES (6), (7): Xaa is C or S
SIPKAXXVPTELRSVKMAKVDEYD

SEQ ID NO: 12026 - protein, 19 aa, Artificial Sequence
  Cyclic GFR-binding peptide
  MOD_RES (6), (6): Xaa is C or S
VTKPTXAPTKLRPVQVRKI

SEQ ID NO: 12027 - protein, 20 aa, Artificial Sequence
  Cyclic GFR-binding peptide
  MOD_RES (6), (7): Xaa is C or S
ASAAPXXVPQALSNITIQIM

SEQ ID NO: 12028 - protein, 16 aa, Artificial Sequence
  Cyclic GFR-binding peptide
  MOD_RES (2), (3): Xaa is C or S
PXXVSQDLRSVKIAKV

SEQ ID NO: 12029 - protein, 23 aa, Artificial Sequence
  Cyclic GFR-binding peptide
  MOD_RES (6), (7): Xaa is C or S
ASAAPXXVPQALRSVKIAKVVGR

SEQ ID NO: 12030 - protein, 18 aa, Artificial Sequence
  Cyclic GFR-binding peptide
QDLRPVQIRKIIGKTPKI

SEQ ID NO: 12031 - protein, 17 aa, Artificial Sequence
  Cyclic GFR-binding peptide
KLSNITVQIMDDSSNVI

SEQ ID NO: 12032 - protein, 22 aa, Artificial Sequence
  Cyclic GFR-binding peptide
  MOD_RES (7), (7): Xaa is C or S
NDEGLEXVPTEEEPLTMLYYRI

SEQ ID NO: 12033 - protein, 27 aa, Artificial Sequence
  Cyclic GFR-binding peptide
  MOD_RES (7), (7): Xaa is C or S
NDEGLEXVPTEEEPLTMLYYRIKPHQG

SEQ ID NO: 12034 - protein, 24 aa, Artificial Sequence
  Cyclic GFR-binding peptide
  MOD_RES (6), (7): Xaa is C or S
ASAAPXXVPQALRPVQIRKIVGRK

SEQ ID NO: 12035 - protein, 20 aa, Artificial Sequence
  Cyclic GFR-binding peptide
  MOD_RES (7), (7): Xaa is C or S
HVTKPTXAPTKLRSVKVAKV

SEQ ID NO: 12036 - protein, 13 aa, Artificial Sequence
  Cyclic GFR-binding peptide
APTKLRSVKVAKV

SEQ ID NO: 12037 - protein, 16 aa, Artificial Sequence
  Cyclic GFR-binding peptide
LRPVQMRKIDENEKVV

SEQ ID NO: 12038 - protein, 25 aa, Artificial Sequence
  Cyclic GFR-binding peptide
  MOD_RES (6), (7): Xaa is C or S
ASAAPXXVPQALRSVKIAKVVGRKP

SEQ ID NO: 12039 - protein, 26 aa, Artificial Sequence
  Cyclic GFR-binding peptide
  MOD_RES (6), (7): Xaa is C or S
ASASPXXVPQDLRSVKIAKVVGRTPK

SEQ ID NO: 12040 - protein, 15 aa, Artificial Sequence
  Cyclic GFR-binding peptide
RPTQVQLEPLTVLYY

SEQ ID NO: 12041 - protein, 25 aa, Artificial Sequence
  Cyclic GFR-binding peptide
  MOD_RES (6), (7): Xaa is C or S
ASAAPXXVPQALSNITIQIMVGRKP

SEQ ID NO: 12042 - protein, 18 aa, Artificial Sequence
  Cyclic GFR-binding peptide
  MOD_RES (4), (5): Xaa is C or S
PKPXXAPTQLSNITVQIM

SEQ ID NO: 12043 - protein, 25 aa, Artificial Sequence
  Cyclic GFR-binding peptide
  MOD_RES (6), (7): Xaa is C or S
YVPKPXXAPTKLRPVQVRKIDDSSN

SEQ ID NO: 12044 - protein, 22 aa, Artificial Sequence
  Cyclic GFR-binding peptide
  MOD_RES (5), (5): Xaa is C or S
RNVQXRPTQVQLEPLTVLYYEI

SEQ ID NO: 12045 - protein, 20 aa, Artificial Sequence
  Cyclic GFR-binding peptide
VQLEPLTVLYYEIVRKKPIF

SEQ ID NO: 12046 - protein, 25 aa, Artificial Sequence
  Cyclic GFR-binding peptide
  MOD_RES (6), (7): Xaa is C or S
KIPKAXXVPTELSNITMQIMDENEK

SEQ ID NO: 12047 - protein, 25 aa, Artificial Sequence
  Cyclic GFR-binding peptide
  MOD_RES (5), (5): Xaa is C or S
RNVQXRPTQVQLEPLTVLYYEIVRK

SEQ ID NO: 12048 - protein, 27 aa, Artificial Sequence
  Cyclic GFR-binding peptide
  MOD_RES (6), (7): Xaa is C or S
ASAAPXXVPQALRSVKIAKVVGRKPKV

SEQ ID NO: 12049 - protein, 24 aa, Artificial Sequence
  Cyclic GFR-binding peptide
  MOD_RES (6), (7): Xaa is C or S
YVPKPXXAPTKLRPVQVRKIDDSS

SEQ ID NO: 12050 - protein, 17 aa, Artificial Sequence
  Cyclic GFR-binding peptide
  MOD_RES (3), (4): Xaa is C or S
KPXXAPTKLRPVQVRKI

SEQ ID NO: 12051 - protein, 17 aa, Artificial Sequence
  Cyclic GFR-binding peptide
  MOD_RES (2), (2): Xaa is C or S
KXQPSRVHHEPLPVVYY

SEQ ID NO: 12052 - protein, 20 aa, Artificial Sequence
  Cyclic GFR-binding peptide
  MOD_RES (6), (7): Xaa is C or S
ASASPXXVPQDLRPVQIRKI

SEQ ID NO: 12053 - protein, 15 aa, Artificial Sequence
  Cyclic GFR-binding peptide
RSVKIAKVVGRKPKV

SEQ ID NO: 12054 - protein, 16 aa, Artificial Sequence
  Cyclic GFR-binding peptide
  MOD_RES (2), (3): Xaa is C or S
PXXVPQALRSVKIAKV

SEQ ID NO: 12055 - protein, 17 aa, Artificial Sequence
  Cyclic GFR-binding peptide
  MOD_RES (3), (4): Xaa is C or S
KAXXVPTELSNITMQIM

SEQ ID NO: 12056 - protein, 20 aa, Artificial Sequence
  Cyclic GFR-binding peptide
  MOD_RES (6), (7): Xaa is C or S
ASAAPXXVPQALRPVQIRKI

SEQ ID NO: 12057 - protein, 23 aa, Artificial Sequence
  Cyclic GFR-binding peptide
  MOD_RES (6), (7): Xaa is C or S
ASAAPXXVPQALSNITIQIMVGR

SEQ ID NO: 12058 - protein, 15 aa, Artificial Sequence
  Cyclic GFR-binding peptide
  MOD_RES (1), (2): Xaa is C or S
XXAPTKLRSVKVAKV

SEQ ID NO: 12059 - protein, 18 aa, Artificial Sequence
  Cyclic GFR-binding peptide
TELRPVQMRKIDEYDKVV

SEQ ID NO: 12060 - protein, 19 aa, Artificial Sequence
  Cyclic GFR-binding peptide
EEEPLTMLYYRIKPHQGQH

SEQ ID NO: 12061 - protein, 22 aa, Artificial Sequence
  Cyclic GFR-binding peptide
  MOD_RES (6), (7): Xaa is C or S
SIPKAXXVPTELRSVKMAKVDE

SEQ ID NO: 12062 - protein, 22 aa, Artificial Sequence
  Cyclic GFR-binding peptide
  MOD_RES (7), (7): Xaa is C or S
HVTKPTXAPTKLRSVKVAKVDD

SEQ ID NO: 12063 - protein, 16 aa, Artificial Sequence
  Cyclic GFR-binding peptide
LSNITVQIMDDSSNVI

SEQ ID NO: 12064 - protein, 27 aa, Artificial Sequence
  Cyclic GFR-binding peptide
  MOD_RES (6), (7): Xaa is C or S
ASAAPXXVPQALSNITIQIMVGRKPKV

SEQ ID NO: 12065 - protein, 27 aa, Artificial Sequence
  Cyclic GFR-binding peptide
  MOD_RES (6), (7): Xaa is C or S
ASASPXXVSQDLRPVQIRKIIGKTPKI

SEQ ID NO: 12066 - protein, 19 aa, Artificial Sequence
  Cyclic GFR-binding peptide
PTELRPVQMRKIDEYDKVV

SEQ ID NO: 12067 - protein, 21 aa, Artificial Sequence
  Cyclic GFR-binding peptide
  MOD_RES (6), (7): Xaa is C or S
ASASPXXVPQDLRPVQIRKIV

SEQ ID NO: 12068 - protein, 29 aa, Artificial Sequence
  Cyclic GFR-binding peptide
  MOD_RES (5), (5): Xaa is C or S
SSVKXQPSRVHHEPLTVLYYEYVRKKPKL

SEQ ID NO: 12069 - protein, 20 aa, Artificial Sequence
  Cyclic GFR-binding peptide
  MOD_RES (7), (7): Xaa is C or S
NDEGLEXVPTEEEPLTMLYY

SEQ ID NO: 12070 - protein, 28 aa, Artificial Sequence
  Cyclic GFR-binding peptide
  MOD_RES (7), (7): Xaa is C or S
NDEGLEXVPTEEEPLTMLYYRIKPHQGQ

SEQ ID NO: 12071 - protein, 26 aa, Artificial Sequence
  Cyclic GFR-binding peptide
  MOD_RES (6), (7): Xaa is C or S
ASASPXXVSQDLRSVKIAKVIGKTPK

SEQ ID NO: 12072 - protein, 14 aa, Artificial Sequence
  Cyclic GFR-binding peptide
  MOD_RES (1), (1): Xaa is C or S
XAPTKLSNITVQIM

SEQ ID NO: 12073 - protein, 16 aa, Artificial Sequence
  Cyclic GFR-binding peptide
LRSVKVAKVDDSSNVI

SEQ ID NO: 12074 - protein, 16 aa, Artificial Sequence
  Cyclic GFR-binding peptide
  MOD_RES (1), (1): Xaa is C or S
XRPTQVQLEPLPVVYY

SEQ ID NO: 12075 - protein, 17 aa, Artificial Sequence
  Cyclic GFR-binding peptide
KLRSVKVAKVDDSSNVI

SEQ ID NO: 12076 - protein, 17 aa, Artificial Sequence
  Cyclic GFR-binding peptide
QLRSVKVAKVDDSSNVI

SEQ ID NO: 12077 - protein, 20 aa, Artificial Sequence
  Cyclic GFR-binding peptide
  MOD_RES (6), (7): Xaa is C or S
KIPKAXXVPTELRSVKMAKV

SEQ ID NO: 12078 - protein, 18 aa, Artificial Sequence
  Cyclic GFR-binding peptide
TELRSVKMAKVDENEKVV

SEQ ID NO: 12079 - protein, 21 aa, Artificial Sequence
  Cyclic GFR-binding peptide
RVHHEPLPVVYYEYVRKKPKL

SEQ ID NO: 12080 - protein, 19 aa, Artificial Sequence
  Cyclic GFR-binding peptide
  MOD_RES (6), (6): Xaa is C or S
DEGLEXVPTEEEPLTMLYY

SEQ ID NO: 12081 - protein, 16 aa, Artificial Sequence
  Cyclic GFR-binding peptide
  MOD_RES (2), (3): Xaa is C or S
PXXVPQDLRSVKIAKV

SEQ ID NO: 12082 - protein, 14 aa, Artificial Sequence
  Cyclic GFR-binding peptide
PTQVQLEPLPVVYY

SEQ ID NO: 12083 - protein, 25 aa, Artificial Sequence
  Cyclic GFR-binding peptide
  MOD_RES (6), (7): Xaa is C or S
YVPKPXXAPTKLRSVKVAKVDDSSN

SEQ ID NO: 12084 - protein, 18 aa, Artificial Sequence
  Cyclic GFR-binding peptide
  MOD_RES (3), (3): Xaa is C or S
VKXQPSRVHHEPLPVVYY

SEQ ID NO: 12085 - protein, 21 aa, Artificial Sequence
  Cyclic GFR-binding peptide
  MOD_RES (5), (5): Xaa is C or S
RNVQXRPTQVQLEPLPVVYYE

SEQ ID NO: 12086 - protein, 16 aa, Artificial Sequence
  Cyclic GFR-binding peptide
  MOD_RES (1), (1): Xaa is C or S
XQPSRVHHEPLPVVYY

SEQ ID NO: 12087 - protein, 19 aa, Artificial Sequence
  Cyclic GFR-binding peptide
  MOD_RES (5), (6): Xaa is C or S
SASPXXVSQDLSNITIQIM

SEQ ID NO: 12088 - protein, 19 aa, Artificial Sequence
  Cyclic GFR-binding peptide
SQDLSNITIQIMIGKTPKI

SEQ ID NO: 12089 - protein, 27 aa, Artificial Sequence
  Cyclic GFR-binding peptide
  MOD_RES (6), (7): Xaa is C or S
SIPKAXXVPTELSNITMQIMDEYDKVV

SEQ ID NO: 12090 - protein, 18 aa, Artificial Sequence
  Cyclic GFR-binding peptide
TELSNITMQIMDENEKVV

SEQ ID NO: 12091 - protein, 25 aa, Artificial Sequence
  Cyclic GFR-binding peptide
  MOD_RES (6), (7): Xaa is C or S
ASAAPXXVPQALRPVQIRKIVGRKP

SEQ ID NO: 12092 - protein, 25 aa, Artificial Sequence
  Cyclic GFR-binding peptide
  MOD_RES (6), (7): Xaa is C or S
YVPKPXXAPTKLSNITVQIMDDSSN

SEQ ID NO: 12093 - protein, 15 aa, Artificial Sequence
  Cyclic GFR-binding peptide
SNITIQIMVGRKPKV

SEQ ID NO: 12094 - protein, 26 aa, Artificial Sequence
  Cyclic GFR-binding peptide
  MOD_RES (5), (5): Xaa is C or S
SSVKXQPSRVHHEPLPVVYYEYVRKK

SEQ ID NO: 12095 - protein, 18 aa, Artificial Sequence
  Cyclic GFR-binding peptide
  MOD_RES (5), (5): Xaa is C or S
EGLEXVPTEEEPLTMLYY

SEQ ID NO: 12096 - protein, 18 aa, Artificial Sequence
  Cyclic GFR-binding peptide
  MOD_RES (4), (5): Xaa is C or S
PKPXXAPTKLRSVKVAKV

SEQ ID NO: 12097 - protein, 15 aa, Artificial Sequence
  Cyclic GFR-binding peptide
QPSRVHHEPLTVLYY

SEQ ID NO: 12098 - protein, 22 aa, Artificial Sequence
  Cyclic GFR-binding peptide
  MOD_RES (5), (5): Xaa is C or S
RNVQXRPTQVQLEPLPVVYYEI

SEQ ID NO: 12099 - protein, 17 aa, Artificial Sequence
  Cyclic GFR-binding peptide
ELRPVQMRKIDENEKVV

SEQ ID NO: 12100 - protein, 24 aa, Artificial Sequence
  Cyclic GFR-binding peptide
  MOD_RES (6), (7): Xaa is C or S
SIPKAXXVPTELSNITMQIMDEYD

SEQ ID NO: 12101 - protein, 24 aa, Artificial Sequence
  Cyclic GFR-binding peptide
  MOD_RES (6), (7): Xaa is C or S
ASASPXXVSQDLSNITIQIMIGKT

SEQ ID NO: 12102 - protein, 29 aa, Artificial Sequence
  Cyclic GFR-binding peptide
  MOD_RES (7), (7): Xaa is C or S
NDEGLEXVPTEEEPLTMLYYRIKPHQGQH

SEQ ID NO: 12103 - protein, 23 aa, Artificial Sequence
  Cyclic GFR-binding peptide
  MOD_RES (6), (7): Xaa is C or S
ASASPXXVPQDLSNITIQIMVGR

SEQ ID NO: 12104 - protein, 20 aa, Artificial Sequence
  Cyclic GFR-binding peptide
  MOD_RES (6), (7): Xaa is C or S
TVPKPXXAPTQLSNITVQIM

SEQ ID NO: 12105 - protein, 24 aa, Artificial Sequence
  Cyclic GFR-binding peptide
  MOD_RES (6), (7): Xaa is C or S
TVPKPXXAPTQLRPVQVRKIDDSS

SEQ ID NO: 12106 - protein, 19 aa, Artificial Sequence
  Cyclic GFR-binding peptide
SQDLRSVKIAKVIGKTPKI

SEQ ID NO: 12107 - protein, 26 aa, Artificial Sequence
  Cyclic GFR-binding peptide
  MOD_RES (6), (7): Xaa is C or S
ASAAPXXVPQALRPVQIRKIVGRKPK

SEQ ID NO: 12108 - protein, 20 aa, Artificial Sequence
  Cyclic GFR-binding peptide
  MOD_RES (7), (7): Xaa is C or S
NDEGLEXVPTEEEPLPMVYY

SEQ ID NO: 12109 - protein, 23 aa, Artificial Sequence
  Cyclic GFR-binding peptide
  MOD_RES (6), (7): Xaa is C or S
ASASPXXVSQDLSNITIQIMIGK

SEQ ID NO: 12110 - protein, 18 aa, Artificial Sequence
  Cyclic GFR-binding peptide
  MOD_RES (5), (5): Xaa is C or S
EGLEXVPTEEEPLPMVYY

SEQ ID NO: 12111 - protein, 14 aa, Artificial Sequence
  Cyclic GFR-binding peptide
PSRVHHEPLTVLYY

SEQ ID NO: 12112 - protein, 15 aa, Artificial Sequence
  Cyclic GFR-binding peptide
QPSRVHHEPLPVVYY

SEQ ID NO: 12113 - protein, 16 aa, Artificial Sequence
  Cyclic GFR-binding peptide
  MOD_RES (2), (3): Xaa is C or S
PXXAPTQLRSVKVAKV

SEQ ID NO: 12114 - protein, 25 aa, Artificial Sequence
  Cyclic GFR-binding peptide
  MOD_RES (5), (5): Xaa is C or S
RNVQXRPTQVQLEPLPVVYYEIVRK

SEQ ID NO: 12115 - protein, 23 aa, Artificial Sequence
  Cyclic GFR-binding peptide
  MOD_RES (6), (7): Xaa is C or S
TVPKPXXAPTQLRSVKVAKVDDS

SEQ ID NO: 12116 - protein, 24 aa, Artificial Sequence
  Cyclic GFR-binding peptide
  MOD_RES (6), (7): Xaa is C or S
ASASPXXVPQDLRPVQIRKIVGRT

SEQ ID NO: 12117 - protein, 18 aa, Artificial Sequence
  Cyclic GFR-binding peptide
  MOD_RES (3), (3): Xaa is C or S
VKXQPSRVHHEPLTVLYY

SEQ ID NO: 12118 - protein, 20 aa, Artificial Sequence
  Cyclic GFR-binding peptide
  MOD_RES (5), (5): Xaa is C or S
SSVKXQPSRVHHEPLPVVYY

SEQ ID NO: 12119 - protein, 27 aa, Artificial Sequence
  Cyclic GFR-binding peptide
  MOD_RES (5), (5): Xaa is C or S
SSVKXQPSRVHHEPLTVLYYEYVRKKP

SEQ ID NO: 12120 - protein, 16 aa, Artificial Sequence
  Cyclic GFR-binding peptide
  MOD_RES (2), (3): Xaa is C or S
PXXVPQDLRPVQIRKI

SEQ ID NO: 12121 - protein, 28 aa, Artificial Sequence
  Cyclic GFR-binding peptide
  MOD_RES (5), (5): Xaa is C or S
RNVQXRPTQVQLEPLTVLYYEIVRKKPI

SEQ ID NO: 12122 - protein, 20 aa, Artificial Sequence
  Cyclic GFR-binding peptide
VQLEPLPVVYYEIVRKKPIF

SEQ ID NO: 12123 - protein, 21 aa, Artificial Sequence
  Cyclic GFR-binding peptide
  MOD_RES (7), (7): Xaa is C or S
HVTKPTXAPTKLRSVKVAKVD

SEQ ID NO: 12124 - protein, 20 aa, Artificial Sequence
  Cyclic GFR-binding peptide
  MOD_RES (6), (7): Xaa is C or S
ASASPXXVPQDLSNITIQIM

SEQ ID NO: 12125 - protein, 23 aa, Artificial Sequence
  Cyclic GFR-binding peptide
  MOD_RES (6), (7): Xaa is C or S
SIPKAXXVPTELRPVQMRKIDEY

SEQ ID NO: 12126 - protein, 15 aa, Artificial Sequence
  Cyclic GFR-binding peptide
SNITIQIMIGKTPKI

SEQ ID NO: 12127 - protein, 19 aa, Artificial Sequence
  Cyclic GFR-binding peptide
  MOD_RES (6), (6): Xaa is C or S
DEGLEXVPTEEEPLPMVYY

SEQ ID NO: 12128 - protein, 24 aa, Artificial Sequence
  Cyclic GFR-binding peptide
  MOD_RES (6), (7): Xaa is C or S
ASASPXXVSQDLRSVKIAKVIGKT

SEQ ID NO: 12129 - protein, 21 aa, Artificial Sequence
  Cyclic GFR-binding peptide
  MOD_RES (7), (7): Xaa is C or S
NDEGLEXVPTEEEPLTMLYYR

SEQ ID NO: 12130 - protein, 18 aa, Artificial Sequence
  Cyclic GFR-binding peptide
  MOD_RES (4), (5): Xaa is C or S
AAPXXVPQALRSVKIAKV

SEQ ID NO: 12131 - protein, 13 aa, Artificial Sequence
  Cyclic GFR-binding peptide
SRVHHEPLPVVYY

SEQ ID NO: 12132 - protein, 19 aa, Artificial Sequence
  Cyclic GFR-binding peptide
PQALRPVQIRKIVGRKPKV

SEQ ID NO: 12133 - protein, 16 aa, Artificial Sequence
  Cyclic GFR-binding peptide
  MOD_RES (1), (1): Xaa is C or S
XQPSRVHHEPLTVLYY

SEQ ID NO: 12134 - protein, 19 aa, Artificial Sequence
  Cyclic GFR-binding peptide
QLEPLPVVYYEIVRKKPIF

SEQ ID NO: 12135 - protein, 27 aa, Artificial Sequence
  Cyclic GFR-binding peptide
  MOD_RES (6), (7): Xaa is C or S
KIPKAXXVPTELRSVKMAKVDENEKVV

SEQ ID NO: 12136 - protein, 27 aa, Artificial Sequence
  Cyclic GFR-binding peptide
  MOD_RES (6), (7): Xaa is C or S
TVPKPXXAPTQLSNITVQIMDDSSNVI

SEQ ID NO: 12137 - protein, 16 aa, Artificial Sequence
  Cyclic GFR-binding peptide
  MOD_RES (2), (3): Xaa is C or S
PXXVPQALRPVQIRKI

SEQ ID NO: 12138 - protein, 27 aa, Artificial Sequence
  Cyclic GFR-binding peptide
  MOD_RES (6), (7): Xaa is C or S
ASASPXXVPQDLRSVKIAKVVGRTPKV

SEQ ID NO: 12139 - protein, 25 aa, Artificial Sequence
  Cyclic GFR-binding peptide
  MOD_RES (6), (7): Xaa is C or S
ASASPXXVPQDLSNITIQIMVGRTP

SEQ ID NO: 12140 - protein, 17 aa, Artificial Sequence
  Cyclic GFR-binding peptide
ELSNITMQIMDEYDKVV

SEQ ID NO: 12141 - protein, 20 aa, Artificial Sequence
  Cyclic GFR-binding peptide
  MOD_RES (6), (7): Xaa is C or S
ASASPXXVPQDLRSVKIAKV

SEQ ID NO: 12142 - protein, 19 aa, Artificial Sequence
  Cyclic GFR-binding peptide
  MOD_RES (5), (6): Xaa is C or S
SASPXXVSQDLRPVQIRKI

SEQ ID NO: 12143 - protein, 23 aa, Artificial Sequence
  Cyclic GFR-binding peptide
  MOD_RES (5), (5): Xaa is C or S
RNVQXRPTQVQLEPLPVVYYEIV

SEQ ID NO: 12144 - protein, 19 aa, Artificial Sequence
  Cyclic GFR-binding peptide
PTELRSVKMAKVDENEKVV

SEQ ID NO: 12145 - protein, 25 aa, Artificial Sequence
  Cyclic GFR-binding peptide
  MOD_RES (6), (7): Xaa is C or S
TVPKPXXAPTQLSNITVQIMDDSSN

SEQ ID NO: 12146 - protein, 24 aa, Artificial Sequence
  Cyclic GFR-binding peptide
  MOD_RES (6), (7): Xaa is C or S
SIPKAXXVPTELRPVQMRKIDEYD

SEQ ID NO: 12147 - protein, 19 aa, Artificial Sequence
  Cyclic GFR-binding peptide
PQALSNITIQIMVGRKPKV

SEQ ID NO: 12148 - protein, 23 aa, Artificial Sequence
  Cyclic GFR-binding peptide
  MOD_RES (6), (7): Xaa is C or S
ASASPXXVSQDLRSVKIAKVIGK

SEQ ID NO: 12149 - protein, 13 aa, Artificial Sequence
  Cyclic GFR-binding peptide
APTQLRPVQVRKI

SEQ ID NO: 12150 - protein, 13 aa, Artificial Sequence
  Cyclic GFR-binding peptide
APTKLSNITVQIM

SEQ ID NO: 12151 - protein, 27 aa, Artificial Sequence
  Cyclic GFR-binding peptide
  MOD_RES (6), (7): Xaa is C or S
KIPKAXXVPTELRPVQMRKIDENEKVV

SEQ ID NO: 12152 - protein, 15 aa, Artificial Sequence
  Cyclic GFR-binding peptide
  MOD_RES (1), (2): Xaa is C or S
XXVPQALRPVQIRKI

SEQ ID NO: 12153 - protein, 14 aa, Artificial Sequence
  Cyclic GFR-binding peptide
  MOD_RES (1), (1): Xaa is C or S
XVPTELRSVKMAKV

SEQ ID NO: 12154 - protein, 25 aa, Artificial Sequence
  Cyclic GFR-binding peptide
  MOD_RES (6), (7): Xaa is C or S
TVPKPXXAPTQLRSVKVAKVDDSSN

SEQ ID NO: 12155 - protein, 14 aa, Artificial Sequence
  Cyclic GFR-binding peptide
  MOD_RES (1), (1): Xaa is C or S
XVPQALSNITIQIM

SEQ ID NO: 12156 - protein, 17 aa, Artificial Sequence
  Cyclic GFR-binding peptide
DLRSVKIAKVIGKTPKI

SEQ ID NO: 12157 - protein, 24 aa, Artificial Sequence
  Cyclic GFR-binding peptide
  MOD_RES (6), (7): Xaa is C or S
ASAAPXXVPQALRSVKIAKVVGRK

SEQ ID NO: 12158 - protein, 16 aa, Artificial Sequence
  Cyclic GFR-binding peptide
LSNITIQIMVGRKPKV

SEQ ID NO: 12159 - protein, 16 aa, Artificial Sequence
  Cyclic GFR-binding peptide
  MOD_RES (2), (3): Xaa is C or S
PXXVSQDLSNITIQIM

SEQ ID NO: 12160 - protein, 18 aa, Artificial Sequence
  Cyclic GFR-binding peptide
  MOD_RES (4), (5): Xaa is C or S
AAPXXVPQALRPVQIRKI

SEQ ID NO: 12161 - protein, 26 aa, Artificial Sequence
  Cyclic GFR-binding peptide
  MOD_RES (6), (7): Xaa is C or S
SIPKAXXVPTELRPVQMRKIDEYDKV

SEQ ID NO: 12162 - protein, 16 aa, Artificial Sequence
  Cyclic GFR-binding peptide
  MOD_RES (2), (3): Xaa is C or S
AXXVPTELSNITMQIM

SEQ ID NO: 12163 - protein, 21 aa, Artificial Sequence
  Cyclic GFR-binding peptide
  MOD_RES (6), (7): Xaa is C or S
YVPKPXXAPTKLRSVKVAKVD

SEQ ID NO: 12164 - protein, 23 aa, Artificial Sequence
  Cyclic GFR-binding peptide
  MOD_RES (6), (7): Xaa is C or S
ASASPXXVSQDLRPVQIRKIIGK

SEQ ID NO: 12165 - protein, 17 aa, Artificial Sequence
  Cyclic GFR-binding peptide
ALRPVQIRKIVGRKPKV

SEQ ID NO: 12166 - protein, 19 aa, Artificial Sequence
  Cyclic GFR-binding peptide
PTQLRSVKVAKVDDSSNVI

SEQ ID NO: 12167 - protein, 17 aa, Artificial Sequence
  Cyclic GFR-binding peptide
  MOD_RES (3), (4): Xaa is C or S
SPXXVPQDLRSVKIAKV

SEQ ID NO: 12168 - protein, 24 aa, Artificial Sequence
  Cyclic GFR-binding peptide
  MOD_RES (6), (7): Xaa is C or S
KIPKAXXVPTELRPVQMRKIDENE

SEQ ID NO: 12169 - protein, 17 aa, Artificial Sequence
  Cyclic GFR-binding peptide
  MOD_RES (3), (4): Xaa is C or S
KAXXVPTELRSVKMAKV

SEQ ID NO: 12170 - protein, 16 aa, Artificial Sequence
  Cyclic GFR-binding peptide
LSNITIQIMVGRTPKV

SEQ ID NO: 12171 - protein, 19 aa, Artificial Sequence
  Cyclic GFR-binding peptide
  MOD_RES (6), (6): Xaa is C or S
VTKPTXAPTKLRSVKVAKV

SEQ ID NO: 12172 - protein, 18 aa, Artificial Sequence
  Cyclic GFR-binding peptide
  MOD_RES (4), (5): Xaa is C or S
AAPXXVPQALSNITIQIM

SEQ ID NO: 12173 - protein, 18 aa, Artificial Sequence
  Cyclic GFR-binding peptide
TKLRSVKVAKVDDSSNVI

SEQ ID NO: 12174 - protein, 18 aa, Artificial Sequence
  Cyclic GFR-binding peptide
TQLRSVKVAKVDDSSNVI

SEQ ID NO: 12175 - protein, 26 aa, Artificial Sequence
  Cyclic GFR-binding peptide
  MOD_RES (6), (7): Xaa is C or S
KIPKAXXVPTELRPVQMRKIDENEKV

SEQ ID NO: 12176 - protein, 26 aa, Artificial Sequence
  Cyclic GFR-binding peptide
  MOD_RES (6), (7): Xaa is C or S
SIPKAXXVPTELSNITMQIMDEYDKV

SEQ ID NO: 12177 - protein, 23 aa, Artificial Sequence
  Cyclic GFR-binding peptide
  MOD_RES (6), (7): Xaa is C or S
KIPKAXXVPTELRSVKMAKVDEN

SEQ ID NO: 12178 - protein, 19 aa, Artificial Sequence
  Cyclic GFR-binding peptide
PTKLRSVKVAKVDDSSNVI

SEQ ID NO: 12179 - protein, 18 aa, Artificial Sequence
  Cyclic GFR-binding peptide
  MOD_RES (4), (5): Xaa is C or S
ASPXXVSQDLRSVKIAKV

SEQ ID NO: 12180 - protein, 18 aa, Artificial Sequence
  Cyclic GFR-binding peptide
TQLRPVQVRKIDDSSNVI

SEQ ID NO: 12181 - protein, 18 aa, Artificial Sequence
  Cyclic GFR-binding peptide
TKLRPVQVRKIDDSSNVI

SEQ ID NO: 12182 - protein, 29 aa, Artificial Sequence
  Cyclic GFR-binding peptide
  MOD_RES (7), (7): Xaa is C or S
NDEGLEXVPTEEEPLPMVYYRIKPHQGQH

SEQ ID NO: 12183 - protein, 19 aa, Artificial Sequence
  Cyclic GFR-binding peptide
PQDLRSVKIAKVVGRTPKV

SEQ ID NO: 12184 - protein, 14 aa, Artificial Sequence
  Cyclic GFR-binding peptide
  MOD_RES (1), (1): Xaa is C or S
XAPTKLRSVKVAKV

SEQ ID NO: 12185 - protein, 18 aa, Artificial Sequence
  Cyclic GFR-binding peptide
  MOD_RES (4), (5): Xaa is C or S
PKPXXAPTKLRPVQVRKI

SEQ ID NO: 12186 - protein, 27 aa, Artificial Sequence
  Cyclic GFR-binding peptide
  MOD_RES (7), (7): Xaa is C or S
HVTKPTXAPTKLRPVQVRKIDDSSNVI

SEQ ID NO: 12187 - protein, 24 aa, Artificial Sequence
  Cyclic GFR-binding peptide
  MOD_RES (7), (7): Xaa is C or S
HVTKPTXAPTKLRSVKVAKVDDSS

SEQ ID NO: 12188 - protein, 19 aa, Artificial Sequence
  Cyclic GFR-binding peptide
PQDLRPVQIRKIVGRTPKV

SEQ ID NO: 12189 - protein, 21 aa, Artificial Sequence
  Cyclic GFR-binding peptide
  MOD_RES (6), (7): Xaa is C or S
ASAAPXXVPQALRSVKIAKVV

SEQ ID NO: 12190 - protein, 19 aa, Artificial Sequence
  Cyclic GFR-binding peptide
  MOD_RES (5), (6): Xaa is C or S
IPKAXXVPTELSNITMQIM

SEQ ID NO: 12191 - protein, 27 aa, Artificial Sequence
  Cyclic GFR-binding peptide
  MOD_RES (7), (7): Xaa is C or S
HVTKPTXAPTKLSNITVQIMDDSSNVI

SEQ ID NO: 12192 - protein, 16 aa, Artificial Sequence
  Cyclic GFR-binding peptide
LRSVKMAKVDEYDKVV

SEQ ID NO: 12193 - protein, 27 aa, Artificial Sequence
  Cyclic GFR-binding peptide
  MOD_RES (6), (7): Xaa is C or S
SIPKAXXVPTELRPVQMRKIDEYDKVV

SEQ ID NO: 12194 - protein, 16 aa, Artificial Sequence
  Cyclic GFR-binding peptide
  MOD_RES (2), (3): Xaa is C or S
PXXVPQALSNITIQIM

SEQ ID NO: 12195 - protein, 28 aa, Artificial Sequence
  Cyclic GFR-binding peptide
  MOD_RES (5), (5): Xaa is C or S
SSVKXQPSRVHHEPLTVLYYEYVRKKPK

SEQ ID NO: 12196 - protein, 16 aa, Artificial Sequence
  Cyclic GFR-binding peptide
  MOD_RES (2), (3): Xaa is C or S
PXXVPQDLSNITIQIM

SEQ ID NO: 12197 - protein, 14 aa, Artificial Sequence
  Cyclic GFR-binding peptide
PSRVHHEPLPVVYY

SEQ ID NO: 12198 - protein, 17 aa, Artificial Sequence
  Cyclic GFR-binding peptide
  MOD_RES (4), (4): Xaa is C or S
KPTXAPTKLSNITVQIM

SEQ ID NO: 12199 - protein, 16 aa, Artificial Sequence
  Cyclic GFR-binding peptide
LRPVQMRKIDEYDKVV

SEQ ID NO: 12200 - protein, 24 aa, Artificial Sequence
  Cyclic GFR-binding peptide
  MOD_RES (7), (7): Xaa is C or S
HVTKPTXAPTKLSNITVQIMDDSS

SEQ ID NO: 12201 - protein, 15 aa, Artificial Sequence
  Cyclic GFR-binding peptide
  MOD_RES (1), (2): Xaa is C or S
XXVSQDLSNITIQIM

SEQ ID NO: 12202 - protein, 15 aa, Artificial Sequence
  Cyclic GFR-binding peptide
SNITIQIMVGRTPKV

SEQ ID NO: 12203 - protein, 27 aa, Artificial Sequence
  Cyclic GFR-binding peptide
  MOD_RES (7), (7): Xaa is C or S
NDEGLEXVPTEEEPLPMVYYRIKPHQG

SEQ ID NO: 12204 - protein, 16 aa, Artificial Sequence
  Cyclic GFR-binding peptide
  MOD_RES (3), (3): Xaa is C or S
LEXVPTEEEPLPMVYY

SEQ ID NO: 12205 - protein, 25 aa, Artificial Sequence
  Cyclic GFR-binding peptide
  MOD_RES (7), (7): Xaa is C or S
HVTKPTXAPTKLRPVQVRKIDDSSN

SEQ ID NO: 12206 - protein, 15 aa, Artificial Sequence
  Cyclic GFR-binding peptide
SNITMQIMDENEKVV

SEQ ID NO: 12207 - protein, 25 aa, Artificial Sequence
  Cyclic GFR-binding peptide
  MOD_RES (6), (7): Xaa is C or S
ASASPXXVSQDLSNITIQIMIGKTP

SEQ ID NO: 12208 - protein, 20 aa, Artificial Sequence
  Cyclic GFR-binding peptide
VHHEPLPVVYYEYVRKKPKL

SEQ ID NO: 12209 - protein, 25 aa, Artificial Sequence
  Cyclic GFR-binding peptide
  MOD_RES (7), (7): Xaa is C or S
NDEGLEXVPTEEEPLTMLYYRIKPH

SEQ ID NO: 12210 - protein, 17 aa, Artificial Sequence
  Cyclic GFR-binding peptide
EPLPVVYYEIVRKKPIF

SEQ ID NO: 12211 - protein, 18 aa, Artificial Sequence
  Cyclic GFR-binding peptide
EEPLPMVYYRIKPHQGQH

SEQ ID NO: 12212 - protein, 21 aa, Artificial Sequence
  Cyclic GFR-binding peptide
  MOD_RES (5), (5): Xaa is C or S
RNVQXRPTQVQLEPLTVLYYE

SEQ ID NO: 12213 - protein, 22 aa, Artificial Sequence
  Cyclic GFR-binding peptide
  MOD_RES (6), (7): Xaa is C or S
ASAAPXXVPQALRSVKIAKVVG

SEQ ID NO: 12214 - protein, 26 aa, Artificial Sequence
  Cyclic GFR-binding peptide
  MOD_RES (6), (7): Xaa is C or S
ASASPXXVSQDLRPVQIRKIIGKTPK

SEQ ID NO: 12215 - protein, 18 aa, Artificial Sequence
  Cyclic GFR-binding peptide
TELRPVQMRKIDENEKVV

SEQ ID NO: 12216 - protein, 18 aa, Artificial Sequence
  Cyclic GFR-binding peptide
  MOD_RES (5), (5): Xaa is C or S
TKPTXAPTKLSNITVQIM

SEQ ID NO: 12217 - protein, 21 aa, Artificial Sequence
  Cyclic GFR-binding peptide
  MOD_RES (6), (7): Xaa is C or S
YVPKPXXAPTKLRPVQVRKID

SEQ ID NO: 12218 - protein, 21 aa, Artificial Sequence
  Cyclic GFR-binding peptide
  MOD_RES (6), (7): Xaa is C or S
ASASPXXVSQDLSNITIQIMI

SEQ ID NO: 12219 - protein, 21 aa, Artificial Sequence
  Cyclic GFR-binding peptide
  MOD_RES (5), (5): Xaa is C or S
SSVKXQPSRVHHEPLPVVYYE

SEQ ID NO: 12220 - protein, 15 aa, Artificial Sequence
  Cyclic GFR-binding peptide
  MOD_RES (1), (2): Xaa is C or S
XXVPQDLSNITIQIM

SEQ ID NO: 12221 - protein, 13 aa, Artificial Sequence
  Cyclic GFR-binding peptide
APTKLRPVQVRKI

SEQ ID NO: 12222 - protein, 17 aa, Artificial Sequence
  Cyclic GFR-binding peptide
DLRSVKIAKVVGRTPKV

SEQ ID NO: 12223 - protein, 13 aa, Artificial Sequence
  Cyclic GFR-binding peptide
APTQLSNITVQIM

SEQ ID NO: 12224 - protein, 18 aa, Artificial Sequence
  Cyclic GFR-binding peptide
LEPLTVLYYEIVRKKPIF

SEQ ID NO: 12225 - protein, 13 aa, Artificial Sequence
  Cyclic GFR-binding peptide
TQVQLEPLTVLYY

SEQ ID NO: 12226 - protein, 15 aa, Artificial Sequence
  Cyclic GFR-binding peptide
  MOD_RES (1), (2): Xaa is C or S
XXVPTELRSVKMAKV

SEQ ID NO: 12227 - protein, 25 aa, Artificial Sequence
  Cyclic GFR-binding peptide
  MOD_RES (6), (7): Xaa is C or S
ASASPXXVSQDLRSVKIAKVIGKTP

SEQ ID NO: 12228 - protein, 17 aa, Artificial Sequence
  Cyclic GFR-binding peptide
  MOD_RES (4), (4): Xaa is C or S
KPTXAPTKLRPVQVRKI

SEQ ID NO: 12229 - protein, 16 aa, Artificial Sequence
  Cyclic GFR-binding peptide
  MOD_RES (2), (3): Xaa is C or S
AXXVPTELRPVQMRKI

SEQ ID NO: 12230 - protein, 14 aa, Artificial Sequence
  Cyclic GFR-binding peptide
PTQVQLEPLTVLYY

SEQ ID NO: 12231 - protein, 17 aa, Artificial Sequence
  Cyclic GFR-binding peptide
ALSNITIQIMVGRKPKV

SEQ ID NO: 12232 - protein, 21 aa, Artificial Sequence
  Cyclic GFR-binding peptide
RVHHEPLTVLYYEYVRKKPKL

SEQ ID NO: 12233 - protein, 19 aa, Artificial Sequence
  Cyclic GFR-binding peptide
  MOD_RES (4), (4): Xaa is C or S
NVQXRPTQVQLEPLPVVYY

SEQ ID NO: 12234 - protein, 13 aa, Artificial Sequence
  Cyclic GFR-binding peptide
TQVQLEPLPVVYY

SEQ ID NO: 12235 - protein, 19 aa, Artificial Sequence
  Cyclic GFR-binding peptide
SQDLRPVQIRKIIGKTPKI

SEQ ID NO: 12236 - protein, 16 aa, Artificial Sequence
  Cyclic GFR-binding peptide
LSNITIQIMIGKTPKI

SEQ ID NO: 12237 - protein, 22 aa, Artificial Sequence
  Cyclic GFR-binding peptide
  MOD_RES (6), (7): Xaa is C or S
KIPKAXXVPTELSNITMQIMDE

SEQ ID NO: 12238 - protein, 17 aa, Artificial Sequence
  Cyclic GFR-binding peptide
  MOD_RES (3), (4): Xaa is C or S
KPXXAPTQLSNITVQIM

SEQ ID NO: 12239 - protein, 19 aa, Artificial Sequence
  Cyclic GFR-binding peptide
  MOD_RES (5), (6): Xaa is C or S
VPKPXXAPTKLRSVKVAKV

SEQ ID NO: 12240 - protein, 23 aa, Artificial Sequence
  Cyclic GFR-binding peptide
  MOD_RES (7), (7): Xaa is C or S
NDEGLEXVPTEEEPLTMLYYRIK

SEQ ID NO: 12241 - protein, 20 aa, Artificial Sequence
  Cyclic GFR-binding peptide
  MOD_RES (6), (7): Xaa is C or S
ASASPXXVSQDLRSVKIAKV

SEQ ID NO: 12242 - protein, 24 aa, Artificial Sequence
  Cyclic GFR-binding peptide
  MOD_RES (6), (7): Xaa is C or S
ASAAPXXVPQALSNITIQIMVGRK

SEQ ID NO: 12243 - protein, 14 aa, Artificial Sequence
  Cyclic GFR-binding peptide
  MOD_RES (1), (1): Xaa is C or S
XVPQALRPVQIRKI

SEQ ID NO: 12244 - protein, 21 aa, Artificial Sequence
  Cyclic GFR-binding peptide
  MOD_RES (6), (7): Xaa is C or S
KIPKAXXVPTELRSVKMAKVD

SEQ ID NO: 12245 - protein, 24 aa, Artificial Sequence
  Cyclic GFR-binding peptide
  MOD_RES (6), (7): Xaa is C or S
YVPKPXXAPTKLRSVKVAKVDDSS

SEQ ID NO: 12246 - protein, 15 aa, Artificial Sequence
  Cyclic GFR-binding peptide
SNITVQIMDDSSNVI

SEQ ID NO: 12247 - protein, 20 aa, Artificial Sequence
  Cyclic GFR-binding peptide
  MOD_RES (6), (7): Xaa is C or S
TVPKPXXAPTQLRSVKVAKV

SEQ ID NO: 12248 - protein, 24 aa, Artificial Sequence
  Cyclic GFR-binding peptide
  MOD_RES (6), (7): Xaa is C or S
YVPKPXXAPTKLSNITVQIMDDSS

SEQ ID NO: 12249 - protein, 21 aa, Artificial Sequence
  Cyclic GFR-binding peptide
  MOD_RES (6), (7): Xaa is C or S
TVPKPXXAPTQLSNITVQIMD

SEQ ID NO: 12250 - protein, 18 aa, Artificial Sequence
  Cyclic GFR-binding peptide
  MOD_RES (4), (5): Xaa is C or S
ASPXXVPQDLRSVKIAKV

SEQ ID NO: 12251 - protein, 28 aa, Artificial Sequence
  Cyclic GFR-binding peptide
  MOD_RES (5), (5): Xaa is C or S
SSVKXQPSRVHHEPLPVVYYEYVRKKPK

SEQ ID NO: 12252 - protein, 16 aa, Artificial Sequence
  Cyclic GFR-binding peptide
  MOD_RES (3), (3): Xaa is C or S
LEXVPTEEEPLTMLYY

SEQ ID NO: 12253 - protein, 14 aa, Artificial Sequence
  Cyclic GFR-binding peptide
  MOD_RES (1), (1): Xaa is C or S
XAPTQLRSVKVAKV

SEQ ID NO: 12254 - protein, 15 aa, Artificial Sequence
  Cyclic GFR-binding peptide
  MOD_RES (1), (2): Xaa is C or S
XXVPQALSNITIQIM

SEQ ID NO: 12255 - protein, 14 aa, Artificial Sequence
  Cyclic GFR-binding peptide
  MOD_RES (1), (1): Xaa is C or S
XVPQDLRPVQIRKI

SEQ ID NO: 12256 - protein, 18 aa, Artificial Sequence
  Cyclic GFR-binding peptide
  MOD_RES (4), (5): Xaa is C or S
PKPXXAPTKLSNITVQIM

SEQ ID NO: 12257 - protein, 15 aa, Artificial Sequence
  Cyclic GFR-binding peptide
RPTQVQLEPLPVVYY

SEQ ID NO: 12258 - protein, 18 aa, Artificial Sequence
  Cyclic GFR-binding peptide
  MOD_RES (4), (5): Xaa is C or S
PKAXXVPTELRSVKMAKV

SEQ ID NO: 12259 - protein, 19 aa, Artificial Sequence
  Cyclic GFR-binding peptide
  MOD_RES (5), (6): Xaa is C or S
SAAPXXVPQALRSVKIAKV

SEQ ID NO: 12260 - protein, 22 aa, Artificial Sequence
  Cyclic GFR-binding peptide
  MOD_RES (6), (7): Xaa is C or S
KIPKAXXVPTELRSVKMAKVDE

SEQ ID NO: 12261 - protein, 16 aa, Artificial Sequence
  Cyclic GFR-binding peptide
  MOD_RES (1), (1): Xaa is C or S
XRPTQVQLEPLTVLYY

SEQ ID NO: 12262 - protein, 14 aa, Artificial Sequence
  Cyclic GFR-binding peptide
  MOD_RES (1), (1): Xaa is C or S
XVSQDLSNITIQIM

SEQ ID NO: 12263 - protein, 21 aa, Artificial Sequence
  Cyclic GFR-binding peptide
PTEEEPLPMVYYRIKPHQGQH

SEQ ID NO: 12264 - protein, 18 aa, Artificial Sequence
  Cyclic GFR-binding peptide
  MOD_RES (4), (5): Xaa is C or S
PKPXXAPTQLRPVQVRKI

SEQ ID NO: 12265 - protein, 18 aa, Artificial Sequence
  Cyclic GFR-binding peptide
QDLRPVQIRKIVGRTPKV

SEQ ID NO: 12266 - protein, 23 aa, Artificial Sequence
  Cyclic GFR-binding peptide
  MOD_RES (7), (7): Xaa is C or S
HVTKPTXAPTKLRSVKVAKVDDS

SEQ ID NO: 12267 - protein, 21 aa, Artificial Sequence
  Cyclic GFR-binding peptide
QVQLEPLTVLYYEIVRKKPIF

SEQ ID NO: 12268 - protein, 26 aa, Artificial Sequence
  Cyclic GFR-binding peptide
  MOD_RES (6), (7): Xaa is C or S
ASASPXXVPQDLRPVQIRKIVGRTPK

SEQ ID NO: 12269 - protein, 26 aa, Artificial Sequence
  Cyclic GFR-binding peptide
  MOD_RES (5), (5): Xaa is C or S
RNVQXRPTQVQLEPLTVLYYEIVRKK

SEQ ID NO: 12270 - protein, 17 aa, Artificial Sequence
  Cyclic GFR-binding peptide
  MOD_RES (3), (4): Xaa is C or S
KPXXAPTKLSNITVQIM

SEQ ID NO: 12271 - protein, 21 aa, Artificial Sequence
  Cyclic GFR-binding peptide
  MOD_RES (6), (7): Xaa is C or S
SIPKAXXVPTELSNITMQIMD

SEQ ID NO: 12272 - protein, 20 aa, Artificial Sequence
  Cyclic GFR-binding peptide
TEEEPLPMVYYRIKPHQGQH

SEQ ID NO: 12273 - protein, 25 aa, Artificial Sequence
  Cyclic GFR-binding peptide
  MOD_RES (6), (7): Xaa is C or S
ASASPXXVPQDLRSVKIAKVVGRTP

SEQ ID NO: 12274 - protein, 21 aa, Artificial Sequence
  Cyclic GFR-binding peptide
  MOD_RES (6), (7): Xaa is C or S
ASASPXXVPQDLSNITIQIMV

SEQ ID NO: 12275 - protein, 20 aa, Artificial Sequence
  Cyclic GFR-binding peptide
  MOD_RES (6), (7): Xaa is C or S
SIPKAXXVPTELRSVKMAKV

SEQ ID NO: 12276 - protein, 25 aa, Artificial Sequence
  Cyclic GFR-binding peptide
  MOD_RES (6), (7): Xaa is C or S
KIPKAXXVPTELRSVKMAKVDENEK

SEQ ID NO: 12277 - protein, 15 aa, Artificial Sequence
  Cyclic GFR-binding peptide
RPVQIRKIIGKTPKI

SEQ ID NO: 12278 - protein, 27 aa, Artificial Sequence
  Cyclic GFR-binding peptide
  MOD_RES (6), (7): Xaa is C or S
YVPKPXXAPTKLRSVKVAKVDDSSNVI

SEQ ID NO: 12279 - protein, 19 aa, Artificial Sequence
  Cyclic GFR-binding peptide
EEEPLPMVYYRIKPHQGQH

SEQ ID NO: 12280 - protein, 17 aa, Artificial Sequence
  Cyclic GFR-binding peptide
EPLTVLYYEYVRKKPKL

SEQ ID NO: 12281 - protein, 19 aa, Artificial Sequence
  Cyclic GFR-binding peptide
  MOD_RES (4), (4): Xaa is C or S
NVQXRPTQVQLEPLTVLYY

SEQ ID NO: 12282 - protein, 19 aa, Artificial Sequence
  Cyclic GFR-binding peptide
HHEPLTVLYYEYVRKKPKL

SEQ ID NO: 12283 - protein, 26 aa, Artificial Sequence
  Cyclic GFR-binding peptide
  MOD_RES (20), (21): Xaa is C or S
IQQKDNFYLMSIANMKTPTXXPGASG

SEQ ID NO: 12284 - protein, 17 aa, Artificial Sequence
  Cyclic GFR-binding peptide
LLVRGNDFYLMSIANTK

SEQ ID NO: 12285 - protein, 19 aa, Artificial Sequence
  Cyclic GFR-binding peptide
IIQQKDNFYLMSIANMKTP

SEQ ID NO: 12286 - protein, 16 aa, Artificial Sequence
  Cyclic GFR-binding peptide
IIQQKDNFYLMSIANM

SEQ ID NO: 12287 - protein, 25 aa, Artificial Sequence
  Cyclic GFR-binding peptide
  MOD_RES (19), (20): Xaa is C or S
QQKDNFYLMSIANMKTPTXXPGASG

SEQ ID NO: 12288 - protein, 15 aa, Artificial Sequence
  Cyclic GFR-binding peptide
  MOD_RES (14), (15): Xaa is C or S
FYLMSIANTKVPAXX

SEQ ID NO: 12289 - protein, 21 aa, Artificial Sequence
  Cyclic GFR-binding peptide
  MOD_RES (15), (16): Xaa is C or S
DFYLMSIANTKVPAXXTSPVR

SEQ ID NO: 12290 - protein, 27 aa, Artificial Sequence
  Cyclic GFR-binding peptide
  MOD_RES (21), (22): Xaa is C or S
LLVRGNDFYLMSIANTKVPAXXTSPVR

SEQ ID NO: 12291 - protein, 24 aa, Artificial Sequence
  Cyclic GFR-binding peptide
  MOD_RES (18), (19): Xaa is C or S
QKDNFYLMSIANMKTPTXXPGASG

SEQ ID NO: 12292 - protein, 19 aa, Artificial Sequence
  Cyclic GFR-binding peptide
LLVRGNDFYLMSIANTKVP

SEQ ID NO: 12293 - protein, 20 aa, Artificial Sequence
  Cyclic GFR-binding peptide
  MOD_RES (14), (15): Xaa is C or S
FYLMSIANMKTPTXXPGASG

SEQ ID NO: 12294 - protein, 13 aa, Artificial Sequence
  Cyclic GFR-binding peptide
FYLMSIANMKTPT

SEQ ID NO: 12295 - protein, 20 aa, Artificial Sequence
  Cyclic GFR-binding peptide
  MOD_RES (14), (15): Xaa is C or S
FYLMSIANTKVPAXXTSPVR

SEQ ID NO: 12296 - protein, 14 aa, Artificial Sequence
  Cyclic GFR-binding peptide
  MOD_RES (14), (14): Xaa is C or S
FYLMSIANTKVPAX

SEQ ID NO: 12297 - protein, 19 aa, Artificial Sequence
  Cyclic GFR-binding peptide
  MOD_RES (14), (15): Xaa is C or S
FYLMSIANTKVPAXXTSPV

SEQ ID NO: 12298 - protein, 17 aa, Artificial Sequence
  Cyclic GFR-binding peptide
IIQQKDNFYLMSIANMK

SEQ ID NO: 12299 - protein, 25 aa, Artificial Sequence
  Cyclic GFR-binding peptide
  MOD_RES (19), (20): Xaa is C or S
VRGNDFYLMSIANTKVPAXXTSPVR

SEQ ID NO: 12300 - protein, 21 aa, Artificial Sequence
  Cyclic GFR-binding peptide
  MOD_RES (15), (16): Xaa is C or S
NFYLMSIANMKTPTXXPGASG

SEQ ID NO: 12301 - protein, 18 aa, Artificial Sequence
  Cyclic GFR-binding peptide
IIQQKDNFYLMSIANMKT

SEQ ID NO: 12302 - protein, 15 aa, Artificial Sequence
  Cyclic GFR-binding peptide
LLVRGNDFYLMSIAN

SEQ ID NO: 12303 - protein, 23 aa, Artificial Sequence
  Cyclic GFR-binding peptide
  MOD_RES (17), (18): Xaa is C or S
KDNFYLMSIANMKTPTXXPGASG

SEQ ID NO: 12304 - protein, 16 aa, Artificial Sequence
  Cyclic GFR-binding peptide
  MOD_RES (14), (15): Xaa is C or S
FYLMSIANMKTPTXXP

SEQ ID NO: 12305 - protein, 22 aa, Artificial Sequence
  Cyclic GFR-binding peptide
  MOD_RES (16), (17): Xaa is C or S
NDFYLMSIANTKVPAXXTSPVR

SEQ ID NO: 12306 - protein, 15 aa, Artificial Sequence
  Cyclic GFR-binding peptide
  MOD_RES (14), (15): Xaa is C or S
FYLMSIANMKTPTXX

SEQ ID NO: 12307 - protein, 17 aa, Artificial Sequence
  Cyclic GFR-binding peptide
  MOD_RES (14), (15): Xaa is C or S
FYLMSIANMKTPTXXPG

SEQ ID NO: 12308 - protein, 24 aa, Artificial Sequence
  Cyclic GFR-binding peptide
  MOD_RES (18), (19): Xaa is C or S
RGNDFYLMSIANTKVPAXXTSPVR

SEQ ID NO: 12309 - protein, 18 aa, Artificial Sequence
  Cyclic GFR-binding peptide
  MOD_RES (14), (15): Xaa is C or S
FYLMSIANMKTPTXXPGA

SEQ ID NO: 12310 - protein, 26 aa, Artificial Sequence
  Cyclic GFR-binding peptide
  MOD_RES (20), (21): Xaa is C or S
LVRGNDFYLMSIANTKVPAXXTSPVR

SEQ ID NO: 12311 - protein, 18 aa, Artificial Sequence
  Cyclic GFR-binding peptide
LLVRGNDFYLMSIANTKV

SEQ ID NO: 12312 - protein, 16 aa, Artificial Sequence
  Cyclic GFR-binding peptide
LLVRGNDFYLMSIANT

SEQ ID NO: 12313 - protein, 19 aa, Artificial Sequence
  Cyclic GFR-binding peptide
  MOD_RES (14), (15): Xaa is C or S
FYLMSIANMKTPTXXPGAS

SEQ ID NO: 12314 - protein, 23 aa, Artificial Sequence
  Cyclic GFR-binding peptide
  MOD_RES (17), (18): Xaa is C or S
GNDFYLMSIANTKVPAXXTSPVR

SEQ ID NO: 12315 - protein, 18 aa, Artificial Sequence
  Cyclic GFR-binding peptide
  MOD_RES (14), (15): Xaa is C or S
FYLMSIANTKVPAXXTSP

SEQ ID NO: 12316 - protein, 16 aa, Artificial Sequence
  Cyclic GFR-binding peptide
  MOD_RES (14), (15): Xaa is C or S
FYLMSIANTKVPAXXT

SEQ ID NO: 12317 - protein, 13 aa, Artificial Sequence
  Cyclic GFR-binding peptide
FYLMSIANTKVPA

SEQ ID NO: 12318 - protein, 14 aa, Artificial Sequence
  Cyclic GFR-binding peptide
  MOD_RES (14), (14): Xaa is C or S
FYLMSIANMKTPTX

SEQ ID NO: 12319 - protein, 15 aa, Artificial Sequence
  Cyclic GFR-binding peptide
IIQQKDNFYLMSIAN

SEQ ID NO: 12320 - protein, 27 aa, Artificial Sequence
  Cyclic GFR-binding peptide
  MOD_RES (21), (22): Xaa is C or S
IIQQKDNFYLMSIANMKTPTXXPGASG

SEQ ID NO: 12321 - protein, 22 aa, Artificial Sequence
  Cyclic GFR-binding peptide
  MOD_RES (16), (17): Xaa is C or S
DNFYLMSIANMKTPTXXPGASG

SEQ ID NO: 12322 - protein, 17 aa, Artificial Sequence
  Cyclic GFR-binding peptide
  MOD_RES (14), (15): Xaa is C or S
FYLMSIANTKVPAXXTS

SEQ ID NO: 12323 - protein, 26 aa, Artificial Sequence
  Cyclic GFR-binding peptide
  MOD_RES (6), (7): Xaa is C or S
GSAGPXXTPTKMNAISMLYFNDKQQI

SEQ ID NO: 12324 - protein, 17 aa, Artificial Sequence
  Cyclic GFR-binding peptide
KTNAISMLYFDNGRVLL

SEQ ID NO: 12325 - protein, 19 aa, Artificial Sequence
  Cyclic GFR-binding peptide
PTKMNAISMLYFNDKQQII

SEQ ID NO: 12326 - protein, 16 aa, Artificial Sequence
  Cyclic GFR-binding peptide
MNAISMLYFNDKQQII

SEQ ID NO: 12327 - protein, 25 aa, Artificial Sequence
  Cyclic GFR-binding peptide
  MOD_RES (6), (7): Xaa is C or S
GSAGPXXTPTKMNAISMLYFNDKQQ

SEQ ID NO: 12328 - protein, 15 aa, Artificial Sequence
  Cyclic GFR-binding peptide
  MOD_RES (1), (2): Xaa is C or S
XXAPVKTNAISMLYF

SEQ ID NO: 12329 - protein, 21 aa, Artificial Sequence
  Cyclic GFR-binding peptide
  MOD_RES (6), (7): Xaa is C or S
RVPSTXXAPVKTNAISMLYFD

SEQ ID NO: 12330 - protein, 27 aa, Artificial Sequence
  Cyclic GFR-binding peptide
  MOD_RES (6), (7): Xaa is C or S
RVPSTXXAPVKTNAISMLYFDNGRVLL

SEQ ID NO: 12331 - protein, 24 aa, Artificial Sequence
  Cyclic GFR-binding peptide
  MOD_RES (6), (7): Xaa is C or S
GSAGPXXTPTKMNAISMLYFNDKQ

SEQ ID NO: 12332 - protein, 19 aa, Artificial Sequence
  Cyclic GFR-binding peptide
PVKTNAISMLYFDNGRVLL

SEQ ID NO: 12333 - protein, 20 aa, Artificial Sequence
  Cyclic GFR-binding peptide
  MOD_RES (6), (7): Xaa is C or S
GSAGPXXTPTKMNAISMLYF

SEQ ID NO: 12334 - protein, 13 aa, Artificial Sequence
  Cyclic GFR-binding peptide
TPTKMNAISMLYF

SEQ ID NO: 12335 - protein, 20 aa, Artificial Sequence
  Cyclic GFR-binding peptide
  MOD_RES (6), (7): Xaa is C or S
RVPSTXXAPVKTNAISMLYF

SEQ ID NO: 12336 - protein, 14 aa, Artificial Sequence
  Cyclic GFR-binding peptide
  MOD_RES (1), (1): Xaa is C or S
XAPVKTNAISMLYF

SEQ ID NO: 12337 - protein, 19 aa, Artificial Sequence
  Cyclic GFR-binding peptide
  MOD_RES (5), (6): Xaa is C or S
VPSTXXAPVKTNAISMLYF

SEQ ID NO: 12338 - protein, 17 aa, Artificial Sequence
  Cyclic GFR-binding peptide
KMNAISMLYFNDKQQII

SEQ ID NO: 12339 - protein, 25 aa, Artificial Sequence
  Cyclic GFR-binding peptide
  MOD_RES (6), (7): Xaa is C or S
RVPSTXXAPVKTNAISMLYFDNGRV

SEQ ID NO: 12340 - protein, 21 aa, Artificial Sequence
  Cyclic GFR-binding peptide
  MOD_RES (6), (7): Xaa is C or S
GSAGPXXTPTKMNAISMLYFN

SEQ ID NO: 12341 - protein, 18 aa, Artificial Sequence
  Cyclic GFR-binding peptide
TKMNAISMLYFNDKQQII

SEQ ID NO: 12342 - protein, 15 aa, Artificial Sequence
  Cyclic GFR-binding peptide
NAISMLYFDNGRVLL

SEQ ID NO: 12343 - protein, 23 aa, Artificial Sequence
  Cyclic GFR-binding peptide
  MOD_RES (6), (7): Xaa is C or S
GSAGPXXTPTKMNAISMLYFNDK

SEQ ID NO: 12344 - protein, 16 aa, Artificial Sequence
  Cyclic GFR-binding peptide
  MOD_RES (2), (3): Xaa is C or S
PXXTPTKMNAISMLYF

SEQ ID NO: 12345 - protein, 22 aa, Artificial Sequence
  Cyclic GFR-binding peptide
  MOD_RES (6), (7): Xaa is C or S
RVPSTXXAPVKTNAISMLYFDN

SEQ ID NO: 12346 - protein, 15 aa, Artificial Sequence
  Cyclic GFR-binding peptide
  MOD_RES (1), (2): Xaa is C or S
XXTPTKMNAISMLYF

SEQ ID NO: 12347 - protein, 17 aa, Artificial Sequence
  Cyclic GFR-binding peptide
  MOD_RES (3), (4): Xaa is C or S
GPXXTPTKMNAISMLYF

SEQ ID NO: 12348 - protein, 24 aa, Artificial Sequence
  Cyclic GFR-binding peptide
  MOD_RES (6), (7): Xaa is C or S
RVPSTXXAPVKTNAISMLYFDNGR

SEQ ID NO: 12349 - protein, 18 aa, Artificial Sequence
  Cyclic GFR-binding peptide
  MOD_RES (4), (5): Xaa is C or S
AGPXXTPTKMNAISMLYF

SEQ ID NO: 12350 - protein, 26 aa, Artificial Sequence
  Cyclic GFR-binding peptide
  MOD_RES (6), (7): Xaa is C or S
RVPSTXXAPVKTNAISMLYFDNGRVL

SEQ ID NO: 12351 - protein, 18 aa, Artificial Sequence
  Cyclic GFR-binding peptide
VKTNAISMLYFDNGRVLL

SEQ ID NO: 12352 - protein, 16 aa, Artificial Sequence
  Cyclic GFR-binding peptide
TNAISMLYFDNGRVLL

SEQ ID NO: 12353 - protein, 19 aa, Artificial Sequence
  Cyclic GFR-binding peptide
  MOD_RES (5), (6): Xaa is C or S
SAGPXXTPTKMNAISMLYF

SEQ ID NO: 12354 - protein, 23 aa, Artificial Sequence
  Cyclic GFR-binding peptide
  MOD_RES (6), (7): Xaa is C or S
RVPSTXXAPVKTNAISMLYFDNG

SEQ ID NO: 12355 - protein, 18 aa, Artificial Sequence
  Cyclic GFR-binding peptide
  MOD_RES (4), (5): Xaa is C or S
PSTXXAPVKTNAISMLYF

SEQ ID NO: 12356 - protein, 16 aa, Artificial Sequence
  Cyclic GFR-binding peptide
  MOD_RES (2), (3): Xaa is C or S
TXXAPVKTNAISMLYF

SEQ ID NO: 12357 - protein, 13 aa, Artificial Sequence
  Cyclic GFR-binding peptide
APVKTNAISMLYF

SEQ ID NO: 12358 - protein, 14 aa, Artificial Sequence
  Cyclic GFR-binding peptide
  MOD_RES (1), (1): Xaa is C or S
XTPTKMNAISMLYF

SEQ ID NO: 12359 - protein, 15 aa, Artificial Sequence
  Cyclic GFR-binding peptide
NAISMLYFNDKQQII

SEQ ID NO: 12360 - protein, 27 aa, Artificial Sequence
  Cyclic GFR-binding peptide
  MOD_RES (6), (7): Xaa is C or S
GSAGPXXTPTKMNAISMLYFNDKQQII

SEQ ID NO: 12361 - protein, 22 aa, Artificial Sequence
  Cyclic GFR-binding peptide
  MOD_RES (6), (7): Xaa is C or S
GSAGPXXTPTKMNAISMLYFND

SEQ ID NO: 12362 - protein, 17 aa, Artificial Sequence
  Cyclic GFR-binding peptide
  MOD_RES (3), (4): Xaa is C or S
STXXAPVKTNAISMLYF

SEQ ID NO: 12363 - protein, 16 aa, Artificial Sequence
  Cyclic GFR-binding peptide
VVNNASDYYLISTASL

SEQ ID NO: 12364 - protein, 13 aa, Artificial Sequence
  Cyclic GFR-binding peptide
YYLISTASLRTPV

SEQ ID NO: 12365 - protein, 24 aa, Artificial Sequence
  Cyclic GFR-binding peptide
  MOD_RES (18), (19): Xaa is C or S
KNEDFYLINIPSMKEPVXXPEPIG

SEQ ID NO: 12366 - protein, 14 aa, Artificial Sequence
  Cyclic GFR-binding peptide
  MOD_RES (14), (14): Xaa is C or S
YYLISTASMKEPVX

SEQ ID NO: 12367 - protein, 18 aa, Artificial Sequence
  Cyclic GFR-binding peptide
  MOD_RES (14), (15): Xaa is C or S
FYLINIPSMKEPVXXPEP

SEQ ID NO: 12368 - protein, 19 aa, Artificial Sequence
  Cyclic GFR-binding peptide
  MOD_RES (14), (15): Xaa is C or S
YYLMSTASTKVPAXXTSPV

SEQ ID NO: 12369 - protein, 21 aa, Artificial Sequence
  Cyclic GFR-binding peptide
  MOD_RES (15), (16): Xaa is C or S
DLYLISIPEMKEPVXXPEPIG

SEQ ID NO: 12370 - protein, 16 aa, Artificial Sequence
  Cyclic GFR-binding peptide
  MOD_RES (14), (15): Xaa is C or S
KYLISIPSMKEPVXXP

SEQ ID NO: 12371 - protein, 15 aa, Artificial Sequence
  Cyclic GFR-binding peptide
IIQQKDNKYLMSIPS

SEQ ID NO: 12372 - protein, 27 aa, Artificial Sequence
  Cyclic GFR-binding peptide
  MOD_RES (21), (22): Xaa is C or S
IIQQKDNKYLMSIPSMKTPTXXPGASG

SEQ ID NO: 12373 - protein, 24 aa, Artificial Sequence
  Cyclic GFR-binding peptide
  MOD_RES (18), (19): Xaa is C or S
NASDLYLISIPELRTPVXXTPPTS

SEQ ID NO: 12374 - protein, 27 aa, Artificial Sequence
  Cyclic GFR-binding peptide
  MOD_RES (21), (22): Xaa is C or S
VVNKNEDKYLISIPSMKEPVXXPEPIG

SEQ ID NO: 12375 - protein, 24 aa, Artificial Sequence
  Cyclic GFR-binding peptide
  MOD_RES (18), (19): Xaa is C or S
KNEDYYLISTASMKEPVXXPEPIG

SEQ ID NO: 12376 - protein, 25 aa, Artificial Sequence
  Cyclic GFR-binding peptide
  MOD_RES (19), (20): Xaa is C or S
NKNEDYYLISTASMKEPVXXPEPIG

SEQ ID NO: 12377 - protein, 14 aa, Artificial Sequence
  Cyclic GFR-binding peptide
  MOD_RES (14), (14): Xaa is C or S
FYLINIPSLDQPVX

SEQ ID NO: 12378 - protein, 21 aa, Artificial Sequence
  Cyclic GFR-binding peptide
  MOD_RES (15), (16): Xaa is C or S
NYYLMSTASMKTPTXXPGASG

SEQ ID NO: 12379 - protein, 17 aa, Artificial Sequence
  Cyclic GFR-binding peptide
  MOD_RES (14), (15): Xaa is C or S
FYLINIPSLAQPVXXPA

SEQ ID NO: 12380 - protein, 17 aa, Artificial Sequence
  Cyclic GFR-binding peptide
  MOD_RES (14), (15): Xaa is C or S
YYLMSTASMKTPTXXPG

SEQ ID NO: 12381 - protein, 19 aa, Artificial Sequence
  Cyclic GFR-binding peptide
LLVRGNDYYLMSTASTKVP

SEQ ID NO: 12382 - protein, 22 aa, Artificial Sequence
  Cyclic GFR-binding peptide
  MOD_RES (16), (17): Xaa is C or S
GVFYLINIPSLDQPVXXPSASA

SEQ ID NO: 12383 - protein, 17 aa, Artificial Sequence
  Cyclic GFR-binding peptide
  MOD_RES (14), (15): Xaa is C or S
FYLINIPSLDQPVXXPS

SEQ ID NO: 12384 - protein, 15 aa, Artificial Sequence
  Cyclic GFR-binding peptide
  MOD_RES (14), (15): Xaa is C or S
LYLMSIPEMKTPTXX

SEQ ID NO: 12385 - protein, 13 aa, Artificial Sequence
  Cyclic GFR-binding peptide
LYLMSIPEMKTPT

SEQ ID NO: 12386 - protein, 24 aa, Artificial Sequence
  Cyclic GFR-binding peptide
  MOD_RES (18), (19): Xaa is C or S
TKGIFYLINIPSLDQSVXXPSASA

SEQ ID NO: 12387 - protein, 24 aa, Artificial Sequence
  Cyclic GFR-binding peptide
  MOD_RES (18), (19): Xaa is C or S
RGNDYYLMSTASTKVPAXXTSPVR

SEQ ID NO: 12388 - protein, 15 aa, Artificial Sequence
  Cyclic GFR-binding peptide
VVNNASDKYLISIPS

SEQ ID NO: 12389 - protein, 15 aa, Artificial Sequence
  Cyclic GFR-binding peptide
  MOD_RES (14), (15): Xaa is C or S
YYLMSTASTKVPAXX

SEQ ID NO: 12390 - protein, 19 aa, Artificial Sequence
  Cyclic GFR-binding peptide
  MOD_RES (14), (15): Xaa is C or S
FYLINIPSLDQPVXXPSAS

SEQ ID NO: 12391 - protein, 20 aa, Artificial Sequence
  Cyclic GFR-binding peptide
  MOD_RES (14), (15): Xaa is C or S
YYLISTASMKEPVXXPEPIG

SEQ ID NO: 12392 - protein, 22 aa, Artificial Sequence
  Cyclic GFR-binding peptide
  MOD_RES (16), (17): Xaa is C or S
NDLYLMSIPETKVPAXXTSPVR

SEQ ID NO: 12393 - protein, 18 aa, Artificial Sequence
  Cyclic GFR-binding peptide
  MOD_RES (14), (15): Xaa is C or S
LYLMSIPETKVPAXXTSP

SEQ ID NO: 12394 - protein, 20 aa, Artificial Sequence
  Cyclic GFR-binding peptide
  MOD_RES (14), (15): Xaa is C or S
YYLISTASLRAPVXXSAPAA

SEQ ID NO: 12395 - protein, 15 aa, Artificial Sequence
  Cyclic GFR-binding peptide
VVNNASDLYLISIPE

SEQ ID NO: 12396 - protein, 19 aa, Artificial Sequence
  Cyclic GFR-binding peptide
VVNKNEDFYLINIPSMKEP

SEQ ID NO: 12397 - protein, 15 aa, Artificial Sequence
  Cyclic GFR-binding peptide
VKPTRGVFYLINIPS

SEQ ID NO: 12398 - protein, 18 aa, Artificial Sequence
  Cyclic GFR-binding peptide
VVNNASDKYLISIPSLRT

SEQ ID NO: 12399 - protein, 22 aa, Artificial Sequence
  Cyclic GFR-binding peptide
  MOD_RES (16), (17): Xaa is C or S
DDKYLVSIPSLKTPAXXPKPVH

SEQ ID NO: 12400 - protein, 16 aa, Artificial Sequence
  Cyclic GFR-binding peptide
  MOD_RES (14), (15): Xaa is C or S
KYLMSIPSMKTPTXXP

SEQ ID NO: 12401 - protein, 14 aa, Artificial Sequence
  Cyclic GFR-binding peptide
  MOD_RES (14), (14): Xaa is C or S
YYLISTASLRTPVX

SEQ ID NO: 12402 - protein, 13 aa, Artificial Sequence
  Cyclic GFR-binding peptide
YYLMSTASTKVPA

SEQ ID NO: 12403 - protein, 22 aa, Artificial Sequence
  Cyclic GFR-binding peptide
  MOD_RES (16), (17): Xaa is C or S
NDKYLMSIPSTKVPAXXTSPVR

SEQ ID NO: 12404 - protein, 14 aa, Artificial Sequence
  Cyclic GFR-binding peptide
  MOD_RES (14), (14): Xaa is C or S
LYLMSIPEMKTPTX

SEQ ID NO: 12405 - protein, 17 aa, Artificial Sequence
  Cyclic GFR-binding peptide
YTVVGKDYYLISTASLK

SEQ ID NO: 12406 - protein, 18 aa, Artificial Sequence
  Cyclic GFR-binding peptide
  MOD_RES (14), (15): Xaa is C or S
YYLISTASLKTPVXXAKS

SEQ ID NO: 12407 - protein, 15 aa, Artificial Sequence
  Cyclic GFR-binding peptide
LLVRGNDKYLMSIPS

SEQ ID NO: 12408 - protein, 22 aa, Artificial Sequence
  Cyclic GFR-binding peptide
  MOD_RES (16), (17): Xaa is C or S
DDLYLVSIPELKTPAXXPKPVH

SEQ ID NO: 12409 - protein, 15 aa, Artificial Sequence
  Cyclic GFR-binding peptide
  MOD_RES (14), (15): Xaa is C or S
YYLISTASLRTPVXX

SEQ ID NO: 12410 - protein, 17 aa, Artificial Sequence
  Cyclic GFR-binding peptide
  MOD_RES (14), (15): Xaa is C or S
FYLISIANMKEPVXXPE

SEQ ID NO: 12411 - protein, 15 aa, Artificial Sequence
  Cyclic GFR-binding peptide
IIQQKDNLYLMSIPE

SEQ ID NO: 12412 - protein, 14 aa, Artificial Sequence
  Cyclic GFR-binding peptide
  MOD_RES (14), (14): Xaa is C or S
YYLMSTASTKVPAX

SEQ ID NO: 12413 - protein, 16 aa, Artificial Sequence
  Cyclic GFR-binding peptide
  MOD_RES (14), (15): Xaa is C or S
LYLMSIPETKVPAXXT

SEQ ID NO: 12414 - protein, 17 aa, Artificial Sequence
  Cyclic GFR-binding peptide
LLVRGNDLYLMSIPETK

SEQ ID NO: 12415 - protein, 15 aa, Artificial Sequence
  Cyclic GFR-binding peptide
  MOD_RES (14), (15): Xaa is C or S
FYLINIPSLDQPVXX

SEQ ID NO: 12416 - protein, 16 aa, Artificial Sequence
  Cyclic GFR-binding peptide
VVNKNEDYYLISTASM

SEQ ID NO: 12417 - protein, 19 aa, Artificial Sequence
  Cyclic GFR-binding peptide
  MOD_RES (14), (15): Xaa is C or S
KYLISIPSMKEPVXXPEPI

SEQ ID NO: 12418 - protein, 19 aa, Artificial Sequence
  Cyclic GFR-binding peptide
  MOD_RES (14), (15): Xaa is C or S
YYLISTASLRTPVXXTPPT

SEQ ID NO: 12419 - protein, 21 aa, Artificial Sequence
  Cyclic GFR-binding peptide
  MOD_RES (15), (16): Xaa is C or S
DYYLVSTASLKTPAXXPKPVH

SEQ ID NO: 12420 - protein, 20 aa, Artificial Sequence
  Cyclic GFR-binding peptide
  MOD_RES (14), (15): Xaa is C or S
YYLMSTASTKVPAXXTSPVR

SEQ ID NO: 12421 - protein, 18 aa, Artificial Sequence
  Cyclic GFR-binding peptide
  MOD_RES (14), (15): Xaa is C or S
LYLISIPEMKEPVXXPEP

SEQ ID NO: 12422 - protein, 18 aa, Artificial Sequence
  Cyclic GFR-binding peptide
LLVRGNDKYLMSIPSTKV

SEQ ID NO: 12423 - protein, 16 aa, Artificial Sequence
  Cyclic GFR-binding peptide
  MOD_RES (14), (15): Xaa is C or S
YYLMSTASMKTPTXXP

SEQ ID NO: 12424 - protein, 25 aa, Artificial Sequence
  Cyclic GFR-binding peptide
  MOD_RES (19), (20): Xaa is C or S
NKNEDFYLINIPSMKEPVXXPEPIG

SEQ ID NO: 12425 - protein, 16 aa, Artificial Sequence
  Cyclic GFR-binding peptide
  MOD_RES (14), (15): Xaa is C or S
LYLISIPELRTPVXXT

SEQ ID NO: 12426 - protein, 13 aa, Artificial Sequence
  Cyclic GFR-binding peptide
FYLINIPSLDQPV

SEQ ID NO: 12427 - protein, 21 aa, Artificial Sequence
  Cyclic GFR-binding peptide
  MOD_RES (15), (16): Xaa is C or S
DKYLVSIPSLKTPAXXPKPVH

SEQ ID NO: 12428 - protein, 21 aa, Artificial Sequence
  Cyclic GFR-binding peptide
  MOD_RES (15), (16): Xaa is C or S
VFYLINIPSLAQPVXXPAASA

SEQ ID NO: 12429 - protein, 15 aa, Artificial Sequence
  Cyclic GFR-binding peptide
VVNKNEDLYLISIPE

SEQ ID NO: 12430 - protein, 14 aa, Artificial Sequence
  Cyclic GFR-binding peptide
  MOD_RES (14), (14): Xaa is C or S
KYLISIPSLRTPVX

SEQ ID NO: 12431 - protein, 15 aa, Artificial Sequence
  Cyclic GFR-binding peptide
  MOD_RES (14), (15): Xaa is C or S
LYLISIPEMKEPVXX

SEQ ID NO: 12432 - protein, 16 aa, Artificial Sequence
  Cyclic GFR-binding peptide
  MOD_RES (14), (15): Xaa is C or S
YYLISTASLRTPVXXT

SEQ ID NO: 12433 - protein, 25 aa, Artificial Sequence
  Cyclic GFR-binding peptide
  MOD_RES (19), (20): Xaa is C or S
NNASDLYLISIPELRTPVXXTPPTS

SEQ ID NO: 12434 - protein, 18 aa, Artificial Sequence
  Cyclic GFR-binding peptide
IIQQKDNKYLMSIPSMKT

SEQ ID NO: 12435 - protein, 27 aa, Artificial Sequence
  Cyclic GFR-binding peptide
  MOD_RES (21), (22): Xaa is C or S
YTVVGKDYYLISTASLKTPVXXAKSAK

SEQ ID NO: 12436 - protein, 19 aa, Artificial Sequence
  Cyclic GFR-binding peptide
VVNNAADYYLISTASLRAP

SEQ ID NO: 12437 - protein, 24 aa, Artificial Sequence
  Cyclic GFR-binding peptide
  MOD_RES (18), (19): Xaa is C or S
KNEDFYLISIANMKEPVXXPEPIG

SEQ ID NO: 12438 - protein, 13 aa, Artificial Sequence
  Cyclic GFR-binding peptide
YYLMSTASMKTPT

SEQ ID NO: 12439 - protein, 20 aa, Artificial Sequence
  Cyclic GFR-binding peptide
  MOD_RES (14), (15): Xaa is C or S
LYLISIPELRTPVXXTPPTS

SEQ ID NO: 12440 - protein, 17 aa, Artificial Sequence
  Cyclic GFR-binding peptide
  MOD_RES (14), (15): Xaa is C or S
LYLMSIPEMKTPTXXPG

SEQ ID NO: 12441 - protein, 18 aa, Artificial Sequence
  Cyclic GFR-binding peptide
  MOD_RES (14), (15): Xaa is C or S
YYLMSTASMKTPTXXPGA

SEQ ID NO: 12442 - protein, 19 aa, Artificial Sequence
  Cyclic GFR-binding peptide
  MOD_RES (14), (15): Xaa is C or S
KYLMSIPSTKVPAXXTSPV

SEQ ID NO: 12443 - protein, 26 aa, Artificial Sequence
  Cyclic GFR-binding peptide
  MOD_RES (20), (21): Xaa is C or S
IQQKDNKYLMSIPSMKTPTXXPGASG

SEQ ID NO: 12444 - protein, 23 aa, Artificial Sequence
  Cyclic GFR-binding peptide
  MOD_RES (17), (18): Xaa is C or S
NEDLYLISIPEMKEPVXXPEPIG

SEQ ID NO: 12445 - protein, 16 aa, Artificial Sequence
  Cyclic GFR-binding peptide
  MOD_RES (14), (15): Xaa is C or S
YYLISTASLRAPVXXS

SEQ ID NO: 12446 - protein, 20 aa, Artificial Sequence
  Cyclic GFR-binding peptide
  MOD_RES (14), (15): Xaa is C or S
LYLVSIPELKTPAXXPKPVH

SEQ ID NO: 12447 - protein, 27 aa, Artificial Sequence
  Cyclic GFR-binding peptide
  MOD_RES (21), (22): Xaa is C or S
VVNKNEDFYLISIANMKEPVXXPEPIG

SEQ ID NO: 12448 - protein, 22 aa, Artificial Sequence
  Cyclic GFR-binding peptide
  MOD_RES (16), (17): Xaa is C or S
DNYYLMSTASMKTPTXXPGASG

SEQ ID NO: 12449 - protein, 27 aa, Artificial Sequence
  Cyclic GFR-binding peptide
  MOD_RES (21), (22): Xaa is C or S
VVNNAADYYLISTASLRAPVXXSAPAA

SEQ ID NO: 12450 - protein, 13 aa, Artificial Sequence
  Cyclic GFR-binding peptide
FYLINIPSMKEPV

SEQ ID NO: 12451 - protein, 26 aa, Artificial Sequence
  Cyclic GFR-binding peptide
  MOD_RES (20), (21): Xaa is C or S
TVVGKDYYLISTASLKTPVXXAKSAK

SEQ ID NO: 12452 - protein, 15 aa, Artificial Sequence
  Cyclic GFR-binding peptide
LLVRGNDLYLMSIPE

SEQ ID NO: 12453 - protein, 24 aa, Artificial Sequence
  Cyclic GFR-binding peptide
  MOD_RES (18), (19): Xaa is C or S
KRGVFYLINIPSLAQPVXXPAASA

SEQ ID NO: 12454 - protein, 14 aa, Artificial Sequence
  Cyclic GFR-binding peptide
  MOD_RES (14), (14): Xaa is C or S
LYLISIPEMKEPVX

SEQ ID NO: 12455 - protein, 21 aa, Artificial Sequence
  Cyclic GFR-binding peptide
  MOD_RES (15), (16): Xaa is C or S
NKYLMSIPSMKTPTXXPGASG

SEQ ID NO: 12456 - protein, 17 aa, Artificial Sequence
  Cyclic GFR-binding peptide
VKPTRGVFYLINIPSLD

SEQ ID NO: 12457 - protein, 19 aa, Artificial Sequence
  Cyclic GFR-binding peptide
IIQQKDNYYLMSTASMKTP

SEQ ID NO: 12458 - protein, 25 aa, Artificial Sequence
  Cyclic GFR-binding peptide
  MOD_RES (19), (20): Xaa is C or S
PTRGVFYLINIPSLDQPVXXPSASA

SEQ ID NO: 12459 - protein, 18 aa, Artificial Sequence
  Cyclic GFR-binding peptide
VVNKNEDYYLISTASMKE

SEQ ID NO: 12460 - protein, 27 aa, Artificial Sequence
  Cyclic GFR-binding peptide
  MOD_RES (21), (22): Xaa is C or S
VVNKNEDFYLINIPSMKEPVXXPEPIG

SEQ ID NO: 12461 - protein, 25 aa, Artificial Sequence
  Cyclic GFR-binding peptide
  MOD_RES (19), (20): Xaa is C or S
VVGKDYYLISTASLKTPVXXAKSAK

SEQ ID NO: 12462 - protein, 15 aa, Artificial Sequence
  Cyclic GFR-binding peptide
  MOD_RES (14), (15): Xaa is C or S
YYLISTASMKEPVXX

SEQ ID NO: 12463 - protein, 19 aa, Artificial Sequence
  Cyclic GFR-binding peptide
VKPTRGVFYLINIPSLDQP

SEQ ID NO: 12464 - protein, 23 aa, Artificial Sequence
  Cyclic GFR-binding peptide
  MOD_RES (17), (18): Xaa is C or S
NEDFYLISIANMKEPVXXPEPIG

SEQ ID NO: 12465 - protein, 19 aa, Artificial Sequence
  Cyclic GFR-binding peptide
  MOD_RES (14), (15): Xaa is C or S
LYLISIPELRTPVXXTPPT

SEQ ID NO: 12466 - protein, 18 aa, Artificial Sequence
  Cyclic GFR-binding peptide
  MOD_RES (14), (15): Xaa is C or S
KYLMSIPSMKTPTXXPGA

SEQ ID NO: 12467 - protein, 14 aa, Artificial Sequence
  Cyclic GFR-binding peptide
  MOD_RES (14), (14): Xaa is C or S
LYLMSIPETKVPAX

SEQ ID NO: 12468 - protein, 18 aa, Artificial Sequence
  Cyclic GFR-binding peptide
  MOD_RES (14), (15): Xaa is C or S
LYLISIPELRTPVXXTPP

SEQ ID NO: 12469 - protein, 21 aa, Artificial Sequence
  Cyclic GFR-binding peptide
  MOD_RES (15), (16): Xaa is C or S
DFYLINIPSMKEPVXXPEPIG

SEQ ID NO: 12470 - protein, 15 aa, Artificial Sequence
  Cyclic GFR-binding peptide
  MOD_RES (14), (15): Xaa is C or S
LYLMSIPETKVPAXX

SEQ ID NO: 12471 - protein, 16 aa, Artificial Sequence
  Cyclic GFR-binding peptide
  MOD_RES (14), (15): Xaa is C or S
YYLISTASMKEPVXXP

SEQ ID NO: 12472 - protein, 19 aa, Artificial Sequence
  Cyclic GFR-binding peptide
VVNNASDYYLISTASLRTP

SEQ ID NO: 12473 - protein, 27 aa, Artificial Sequence
  Cyclic GFR-binding peptide
  MOD_RES (21), (22): Xaa is C or S
VVNNASDYYLISTASLRTPVXXTPPTS

SEQ ID NO: 12474 - protein, 15 aa, Artificial Sequence
  Cyclic GFR-binding peptide
YTVVGKDYYLISTAS

SEQ ID NO: 12475 - protein, 26 aa, Artificial Sequence
  Cyclic GFR-binding peptide
  MOD_RES (20), (21): Xaa is C or S
VNNASDKYLISIPSLRTPVXXTPPTS

SEQ ID NO: 12476 - protein, 17 aa, Artificial Sequence
  Cyclic GFR-binding peptide
VVNKNEDLYLISIPEMK

SEQ ID NO: 12477 - protein, 21 aa, Artificial Sequence
  Cyclic GFR-binding peptide
  MOD_RES (15), (16): Xaa is C or S
DYYLISTASMKEPVXXPEPIG

SEQ ID NO: 12478 - protein, 13 aa, Artificial Sequence
  Cyclic GFR-binding peptide
LYLISIPELRTPV

SEQ ID NO: 12479 - protein, 23 aa, Artificial Sequence
  Cyclic GFR-binding peptide
  MOD_RES (17), (18): Xaa is C or S
NEDFYLINIPSMKEPVXXPEPIG

SEQ ID NO: 12480 - protein, 16 aa, Artificial Sequence
  Cyclic GFR-binding peptide
VVNNAADYYLISTASL

SEQ ID NO: 12481 - protein, 26 aa, Artificial Sequence
  Cyclic GFR-binding peptide
  MOD_RES (20), (21): Xaa is C or S
LVRGNDKYLMSIPSTKVPAXXTSPVR

SEQ ID NO: 12482 - protein, 18 aa, Artificial Sequence
  Cyclic GFR-binding peptide
  MOD_RES (14), (15): Xaa is C or S
YYLISTASMKEPVXXPEP

SEQ ID NO: 12483 - protein, 17 aa, Artificial Sequence
  Cyclic GFR-binding peptide
  MOD_RES (14), (15): Xaa is C or S
LYLMSIPETKVPAXXTS

SEQ ID NO: 12484 - protein, 21 aa, Artificial Sequence
  Cyclic GFR-binding peptide
  MOD_RES (15), (16): Xaa is C or S
DKYLISIPSLRTPVXXTPPTS

SEQ ID NO: 12485 - protein, 15 aa, Artificial Sequence
  Cyclic GFR-binding peptide
  MOD_RES (14), (15): Xaa is C or S
KYLMSIPSTKVPAXX

SEQ ID NO: 12486 - protein, 22 aa, Artificial Sequence
  Cyclic GFR-binding peptide
  MOD_RES (16), (17): Xaa is C or S
DDYYLVSTASLKTPAXXPKPVH

SEQ ID NO: 12487 - protein, 14 aa, Artificial Sequence
  Cyclic GFR-binding peptide
  MOD_RES (14), (14): Xaa is C or S
LYLISIPELRTPVX

SEQ ID NO: 12488 - protein, 15 aa, Artificial Sequence
  Cyclic GFR-binding peptide
  MOD_RES (14), (15): Xaa is C or S
FYLISIANMKEPVXX

SEQ ID NO: 12489 - protein, 14 aa, Artificial Sequence
  Cyclic GFR-binding peptide
  MOD_RES (14), (14): Xaa is C or S
KYLMSIPSTKVPAX

SEQ ID NO: 12490 - protein, 20 aa, Artificial Sequence
  Cyclic GFR-binding peptide
  MOD_RES (14), (15): Xaa is C or S
FYLINIPSLDQSVXXPSASA

SEQ ID NO: 12491 - protein, 26 aa, Artificial Sequence
  Cyclic GFR-binding peptide
  MOD_RES (20), (21): Xaa is C or S
VNKNEDFYLISIANMKEPVXXPEPIG

SEQ ID NO: 12492 - protein, 16 aa, Artificial Sequence
  Cyclic GFR-binding peptide
  MOD_RES (14), (15): Xaa is C or S
FYLINIPSLDQPVXXP

SEQ ID NO: 12493 - protein, 19 aa, Artificial Sequence
  Cyclic GFR-binding peptide
  MOD_RES (14), (15): Xaa is C or S
YYLISTASLRAPVXXSAPA

SEQ ID NO: 12494 - protein, 18 aa, Artificial Sequence
  Cyclic GFR-binding peptide
  MOD_RES (14), (15): Xaa is C or S
LYLMSIPEMKTPTXXPGA

SEQ ID NO: 12495 - protein, 13 aa, Artificial Sequence
  Cyclic GFR-binding peptide
KYLISIPSMKEPV

SEQ ID NO: 12496 - protein, 16 aa, Artificial Sequence
  Cyclic GFR-binding peptide
IIQQKDNYYLMSTASM

SEQ ID NO: 12497 - protein, 15 aa, Artificial Sequence
  Cyclic GFR-binding peptide
  MOD_RES (14), (15): Xaa is C or S
KYLISIPSMKEPVXX

SEQ ID NO: 12498 - protein, 15 aa, Artificial Sequence
  Cyclic GFR-binding peptide
VVNKNEDFYLISIAN

SEQ ID NO: 12499 - protein, 19 aa, Artificial Sequence
  Cyclic GFR-binding peptide
VVNKNEDLYLISIPEMKEP

SEQ ID NO: 12500 - protein, 23 aa, Artificial Sequence
  Cyclic GFR-binding peptide
  MOD_RES (17), (18): Xaa is C or S
KDNLYLMSIPEMKTPTXXPGASG

SEQ ID NO: 12501 - protein, 20 aa, Artificial Sequence
  Cyclic GFR-binding peptide
  MOD_RES (14), (15): Xaa is C or S
FYLINIPSMKEPVXXPEPIG

SEQ ID NO: 12502 - protein, 19 aa, Artificial Sequence
  Cyclic GFR-binding peptide
  MOD_RES (14), (15): Xaa is C or S
LYLMSIPETKVPAXXTSPV

SEQ ID NO: 12503 - protein, 20 aa, Artificial Sequence
  Cyclic GFR-binding peptide
  MOD_RES (14), (15): Xaa is C or S
KYLMSIPSTKVPAXXTSPVR

SEQ ID NO: 12504 - protein, 24 aa, Artificial Sequence
  Cyclic GFR-binding peptide
  MOD_RES (18), (19): Xaa is C or S
KNEDLYLISIPEMKEPVXXPEPIG

SEQ ID NO: 12505 - protein, 26 aa, Artificial Sequence
  Cyclic GFR-binding peptide
  MOD_RES (20), (21): Xaa is C or S
VNKNEDKYLISIPSMKEPVXXPEPIG

SEQ ID NO: 12506 - protein, 14 aa, Artificial Sequence
  Cyclic GFR-binding peptide
  MOD_RES (14), (14): Xaa is C or S
KYLISIPSMKEPVX

SEQ ID NO: 12507 - protein, 25 aa, Artificial Sequence
  Cyclic GFR-binding peptide
  MOD_RES (19), (20): Xaa is C or S
NSSDDLYLVSIPELKTPAXXPKPVH

SEQ ID NO: 12508 - protein, 18 aa, Artificial Sequence
  Cyclic GFR-binding peptide
VVNKNEDLYLISIPEMKE

SEQ ID NO: 12509 - protein, 18 aa, Artificial Sequence
  Cyclic GFR-binding peptide
  MOD_RES (14), (15): Xaa is C or S
FYLISIANMKEPVXXPEP

SEQ ID NO: 12510 - protein, 15 aa, Artificial Sequence
  Cyclic GFR-binding peptide
  MOD_RES (14), (15): Xaa is C or S
KYLISIPSLRTPVXX

SEQ ID NO: 12511 - protein, 22 aa, Artificial Sequence
  Cyclic GFR-binding peptide
  MOD_RES (16), (17): Xaa is C or S
NDYYLMSTASTKVPAXXTSPVR

SEQ ID NO: 12512 - protein, 21 aa, Artificial Sequence
  Cyclic GFR-binding peptide
  MOD_RES (15), (16): Xaa is C or S
DYYLISTASLKTPVXXAKSAK

SEQ ID NO: 12513 - protein, 25 aa, Artificial Sequence
  Cyclic GFR-binding peptide
  MOD_RES (19), (20): Xaa is C or S
QQKDNLYLMSIPEMKTPTXXPGASG

SEQ ID NO: 12514 - protein, 20 aa, Artificial Sequence
  Cyclic GFR-binding peptide
  MOD_RES (14), (15): Xaa is C or S
YYLMSTASMKTPTXXPGASG

SEQ ID NO: 12515 - protein, 26 aa, Artificial Sequence
  Cyclic GFR-binding peptide
  MOD_RES (20), (21): Xaa is C or S
VNKNEDLYLISIPEMKEPVXXPEPIG

SEQ ID NO: 12516 - protein, 16 aa, Artificial Sequence
  Cyclic GFR-binding peptide
  MOD_RES (14), (15): Xaa is C or S
FYLINIPSMKEPVXXP

SEQ ID NO: 12517 - protein, 27 aa, Artificial Sequence
  Cyclic GFR-binding peptide
  MOD_RES (21), (22): Xaa is C or S
IKPTKGIFYLINIPSLDQSVXXPSASA

SEQ ID NO: 12518 - protein, 15 aa, Artificial Sequence
  Cyclic GFR-binding peptide
VVNKNEDFYLINIPS

SEQ ID NO: 12519 - protein, 23 aa, Artificial Sequence
  Cyclic GFR-binding peptide
  MOD_RES (17), (18): Xaa is C or S
GNDLYLMSIPETKVPAXXTSPVR

SEQ ID NO: 12520 - protein, 26 aa, Artificial Sequence
  Cyclic GFR-binding peptide
  MOD_RES (20), (21): Xaa is C or S
VNSSDDYYLVSTASLKTPAXXPKPVH

SEQ ID NO: 12521 - protein, 25 aa, Artificial Sequence
  Cyclic GFR-binding peptide
  MOD_RES (19), (20): Xaa is C or S
NNAADYYLISTASLRAPVXXSAPAA

SEQ ID NO: 12522 - protein, 25 aa, Artificial Sequence
  Cyclic GFR-binding peptide
  MOD_RES (19), (20): Xaa is C or S
QQKDNKYLMSIPSMKTPTXXPGASG

SEQ ID NO: 12523 - protein, 13 aa, Artificial Sequence
  Cyclic GFR-binding peptide
KYLMSIPSTKVPA

SEQ ID NO: 12524 - protein, 20 aa, Artificial Sequence
  Cyclic GFR-binding peptide
  MOD_RES (14), (15): Xaa is C or S
FYLINIPSLAQPVXXPAASA

SEQ ID NO: 12525 - protein, 22 aa, Artificial Sequence
  Cyclic GFR-binding peptide
  MOD_RES (16), (17): Xaa is C or S
ADYYLISTASLRAPVXXSAPAA

SEQ ID NO: 12526 - protein, 19 aa, Artificial Sequence
  Cyclic GFR-binding peptide
  MOD_RES (14), (15): Xaa is C or S
KYLMSIPSMKTPTXXPGAS

SEQ ID NO: 12527 - protein, 16 aa, Artificial Sequence
  Cyclic GFR-binding peptide
  MOD_RES (14), (15): Xaa is C or S
LYLISIPEMKEPVXXP

SEQ ID NO: 12528 - protein, 26 aa, Artificial Sequence
  Cyclic GFR-binding peptide
  MOD_RES (20), (21): Xaa is C or S
IQQKDNYYLMSTASMKTPTXXPGASG

SEQ ID NO: 12529 - protein, 19 aa, Artificial Sequence
  Cyclic GFR-binding peptide
  MOD_RES (14), (15): Xaa is C or S
FYLINIPSMKEPVXXPEPI

SEQ ID NO: 12530 - protein, 24 aa, Artificial Sequence
  Cyclic GFR-binding peptide
  MOD_RES (18), (19): Xaa is C or S
NASDYYLISTASLRTPVXXTPPTS

SEQ ID NO: 12531 - protein, 20 aa, Artificial Sequence
  Cyclic GFR-binding peptide
  MOD_RES (14), (15): Xaa is C or S
LYLMSIPEMKTPTXXPGASG

SEQ ID NO: 12532 - protein, 25 aa, Artificial Sequence
  Cyclic GFR-binding peptide
  MOD_RES (19), (20): Xaa is C or S
VRGNDYYLMSTASTKVPAXXTSPVR

SEQ ID NO: 12533 - protein, 18 aa, Artificial Sequence
  Cyclic GFR-binding peptide
LLVRGNDLYLMSIPETKV

SEQ ID NO: 12534 - protein, 18 aa, Artificial Sequence
  Cyclic GFR-binding peptide
  MOD_RES (14), (15): Xaa is C or S
FYLINIPSLDQPVXXPSA

SEQ ID NO: 12535 - protein, 26 aa, Artificial Sequence
  Cyclic GFR-binding peptide
  MOD_RES (20), (21): Xaa is C or S
KPTKGIFYLINIPSLDQSVXXPSASA

SEQ ID NO: 12536 - protein, 18 aa, Artificial Sequence
  Cyclic GFR-binding peptide
  MOD_RES (14), (15): Xaa is C or S
YYLMSTASTKVPAXXTSP

SEQ ID NO: 12537 - protein, 13 aa, Artificial Sequence
  Cyclic GFR-binding peptide
LYLISIPEMKEPV

SEQ ID NO: 12538 - protein, 18 aa, Artificial Sequence
  Cyclic GFR-binding peptide
VVNNAADYYLISTASLRA

SEQ ID NO: 12539 - protein, 25 aa, Artificial Sequence
  Cyclic GFR-binding peptide
  MOD_RES (19), (20): Xaa is C or S
VRGNDKYLMSIPSTKVPAXXTSPVR

SEQ ID NO: 12540 - protein, 20 aa, Artificial Sequence
  Cyclic GFR-binding peptide
  MOD_RES (14), (15): Xaa is C or S
YYLVSTASLKTPAXXPKPVH

SEQ ID NO: 12541 - protein, 16 aa, Artificial Sequence
  Cyclic GFR-binding peptide
YTVVGKDYYLISTASL

SEQ ID NO: 12542 - protein, 24 aa, Artificial Sequence
  Cyclic GFR-binding peptide
  MOD_RES (18), (19): Xaa is C or S
RGNDKYLMSIPSTKVPAXXTSPVR

SEQ ID NO: 12543 - protein, 16 aa, Artificial Sequence
  Cyclic GFR-binding peptide
  MOD_RES (14), (15): Xaa is C or S
YYLISTASLKTPVXXA

SEQ ID NO: 12544 - protein, 19 aa, Artificial Sequence
  Cyclic GFR-binding peptide
  MOD_RES (14), (15): Xaa is C or S
YYLMSTASMKTPTXXPGAS

SEQ ID NO: 12545 - protein, 26 aa, Artificial Sequence
  Cyclic GFR-binding peptide
  MOD_RES (20), (21): Xaa is C or S
KPTRGVFYLINIPSLDQPVXXPSASA

SEQ ID NO: 12546 - protein, 17 aa, Artificial Sequence
  Cyclic GFR-binding peptide
VVNNAADYYLISTASLR

SEQ ID NO: 12547 - protein, 19 aa, Artificial Sequence
  Cyclic GFR-binding peptide
IIQQKDNKYLMSIPSMKTP

SEQ ID NO: 12548 - protein, 15 aa, Artificial Sequence
  Cyclic GFR-binding peptide
  MOD_RES (14), (15): Xaa is C or S
FYLINIPSLDQSVXX

SEQ ID NO: 12549 - protein, 24 aa, Artificial Sequence
  Cyclic GFR-binding peptide
  MOD_RES (18), (19): Xaa is C or S
RGNDLYLMSIPETKVPAXXTSPVR

SEQ ID NO: 12550 - protein, 19 aa, Artificial Sequence
  Cyclic GFR-binding peptide
VVNNASDKYLISIPSLRTP

SEQ ID NO: 12551 - protein, 16 aa, Artificial Sequence
  Cyclic GFR-binding peptide
  MOD_RES (14), (15): Xaa is C or S
FYLINIPSLAQPVXXP

SEQ ID NO: 12552 - protein, 25 aa, Artificial Sequence
  Cyclic GFR-binding peptide
  MOD_RES (19), (20): Xaa is C or S
QQKDNYYLMSTASMKTPTXXPGASG

SEQ ID NO: 12553 - protein, 18 aa, Artificial Sequence
  Cyclic GFR-binding peptide
YTVVGKDYYLISTASLKT

SEQ ID NO: 12554 - protein, 18 aa, Artificial Sequence
  Cyclic GFR-binding peptide
  MOD_RES (14), (15): Xaa is C or S
KYLMSIPSTKVPAXXTSP

SEQ ID NO: 12555 - protein, 19 aa, Artificial Sequence
  Cyclic GFR-binding peptide
VVNKNEDFYLISIANMKEP

SEQ ID NO: 12556 - protein, 20 aa, Artificial Sequence
  Cyclic GFR-binding peptide
  MOD_RES (14), (15): Xaa is C or S
LYLMSIPETKVPAXXTSPVR

SEQ ID NO: 12557 - protein, 22 aa, Artificial Sequence
  Cyclic GFR-binding peptide
  MOD_RES (16), (17): Xaa is C or S
SDYYLISTASLRTPVXXTPPTS

SEQ ID NO: 12558 - protein, 16 aa, Artificial Sequence
  Cyclic GFR-binding peptide
IKPTKGIFYLINIPSL

SEQ ID NO: 12559 - protein, 16 aa, Artificial Sequence
  Cyclic GFR-binding peptide
  MOD_RES (14), (15): Xaa is C or S
YYLMSTASTKVPAXXT

SEQ ID NO: 12560 - protein, 25 aa, Artificial Sequence
  Cyclic GFR-binding peptide
  MOD_RES (19), (20): Xaa is C or S
NNASDKYLISIPSLRTPVXXTPPTS

SEQ ID NO: 12561 - protein, 15 aa, Artificial Sequence
  Cyclic GFR-binding peptide
VVNNASDYYLISTAS

SEQ ID NO: 12562 - protein, 16 aa, Artificial Sequence
  Cyclic GFR-binding peptide
IIQQKDNKYLMSIPSM

SEQ ID NO: 12563 - protein, 21 aa, Artificial Sequence
  Cyclic GFR-binding peptide
  MOD_RES (15), (16): Xaa is C or S
DYYLISTASLRAPVXXSAPAA

SEQ ID NO: 12564 - protein, 17 aa, Artificial Sequence
  Cyclic GFR-binding peptide
  MOD_RES (14), (15): Xaa is C or S
YYLMSTASTKVPAXXTS

SEQ ID NO: 12565 - protein, 17 aa, Artificial Sequence
  Cyclic GFR-binding peptide
VVNKNEDFYLINIPSMK

SEQ ID NO: 12566 - protein, 13 aa, Artificial Sequence
  Cyclic GFR-binding peptide
YYLISTASMKEPV

SEQ ID NO: 12567 - protein, 19 aa, Artificial Sequence
  Cyclic GFR-binding peptide
  MOD_RES (14), (15): Xaa is C or S
LYLMSIPEMKTPTXXPGAS

SEQ ID NO: 12568 - protein, 21 aa, Artificial Sequence
  Cyclic GFR-binding peptide
  MOD_RES (15), (16): Xaa is C or S
DKYLISIPSMKEPVXXPEPIG

SEQ ID NO: 12569 - protein, 27 aa, Artificial Sequence
  Cyclic GFR-binding peptide
  MOD_RES (21), (22): Xaa is C or S
VVNKNEDLYLISIPEMKEPVXXPEPIG

SEQ ID NO: 12570 - protein, 13 aa, Artificial Sequence
  Cyclic GFR-binding peptide
LYLMSIPETKVPA

SEQ ID NO: 12571 - protein, 27 aa, Artificial Sequence
  Cyclic GFR-binding peptide
  MOD_RES (21), (22): Xaa is C or S
IIQQKDNLYLMSIPEMKTPTXXPGASG

SEQ ID NO: 12572 - protein, 16 aa, Artificial Sequence
  Cyclic GFR-binding peptide
  MOD_RES (14), (15): Xaa is C or S
KYLMSIPSTKVPAXXT

SEQ ID NO: 12573 - protein, 25 aa, Artificial Sequence
  Cyclic GFR-binding peptide
  MOD_RES (19), (20): Xaa is C or S
NNASDYYLISTASLRTPVXXTPPTS

SEQ ID NO: 12574 - protein, 16 aa, Artificial Sequence
  Cyclic GFR-binding peptide
VKPKRGVFYLINIPSL

SEQ ID NO: 12575 - protein, 13 aa, Artificial Sequence
  Cyclic GFR-binding peptide
YYLISTASLKTPV

SEQ ID NO: 12576 - protein, 17 aa, Artificial Sequence
  Cyclic GFR-binding peptide
  MOD_RES (14), (15): Xaa is C or S
KYLMSIPSTKVPAXXTS

SEQ ID NO: 12577 - protein, 15 aa, Artificial Sequence
  Cyclic GFR-binding peptide
  MOD_RES (14), (15): Xaa is C or S
LYLISIPELRTPVXX

SEQ ID NO: 12578 - protein, 17 aa, Artificial Sequence
  Cyclic GFR-binding peptide
VVNKNEDFYLISIANMK

SEQ ID NO: 12579 - protein, 18 aa, Artificial Sequence
  Cyclic GFR-binding peptide
VVNKNEDFYLINIPSMKE

SEQ ID NO: 12580 - protein, 19 aa, Artificial Sequence
  Cyclic GFR-binding peptide
YTVVGKDYYLISTASLKTP

SEQ ID NO: 12581 - protein, 20 aa, Artificial Sequence
  Cyclic GFR-binding peptide
  MOD_RES (14), (15): Xaa is C or S
KYLMSIPSMKTPTXXPGASG

SEQ ID NO: 12582 - protein, 23 aa, Artificial Sequence
  Cyclic GFR-binding peptide
  MOD_RES (17), (18): Xaa is C or S
ASDYYLISTASLRTPVXXTPPTS

SEQ ID NO: 12583 - protein, 26 aa, Artificial Sequence
  Cyclic GFR-binding peptide
  MOD_RES (20), (21): Xaa is C or S
VNNASDYYLISTASLRTPVXXTPPTS

SEQ ID NO: 12584 - protein, 27 aa, Artificial Sequence
  Cyclic GFR-binding peptide
  MOD_RES (21), (22): Xaa is C or S
VKPTRGVFYLINIPSLDQPVXXPSASA

SEQ ID NO: 12585 - protein, 26 aa, Artificial Sequence
  Cyclic GFR-binding peptide
  MOD_RES (20), (21): Xaa is C or S
IQQKDNLYLMSIPEMKTPTXXPGASG

SEQ ID NO: 12586 - protein, 18 aa, Artificial Sequence
  Cyclic GFR-binding peptide
VVNNASDYYLISTASLRT

SEQ ID NO: 12587 - protein, 16 aa, Artificial Sequence
  Cyclic GFR-binding peptide
VVNKNEDFYLINIPSM

SEQ ID NO: 12588 - protein, 22 aa, Artificial Sequence
  Cyclic GFR-binding peptide
  MOD_RES (16), (17): Xaa is C or S
SDKYLISIPSLRTPVXXTPPTS

SEQ ID NO: 12589 - protein, 15 aa, Artificial Sequence
  Cyclic GFR-binding peptide
  MOD_RES (14), (15): Xaa is C or S
YYLISTASLRAPVXX

SEQ ID NO: 12590 - protein, 18 aa, Artificial Sequence
  Cyclic GFR-binding peptide
LLVRGNDYYLMSTASTKV

SEQ ID NO: 12591 - protein, 22 aa, Artificial Sequence
  Cyclic GFR-binding peptide
  MOD_RES (16), (17): Xaa is C or S
SDLYLISIPELRTPVXXTPPTS

SEQ ID NO: 12592 - protein, 22 aa, Artificial Sequence
  Cyclic GFR-binding peptide
  MOD_RES (16), (17): Xaa is C or S
DNKYLMSIPSMKTPTXXPGASG

SEQ ID NO: 12593 - protein, 14 aa, Artificial Sequence
  Cyclic GFR-binding peptide
  MOD_RES (14), (14): Xaa is C or S
YYLISTASLRAPVX

SEQ ID NO: 12594 - protein, 16 aa, Artificial Sequence
  Cyclic GFR-binding peptide
VKPTRGVFYLINIPSL

SEQ ID NO: 12595 - protein, 23 aa, Artificial Sequence
  Cyclic GFR-binding peptide
  MOD_RES (17), (18): Xaa is C or S
KGIFYLINIPSLDQSVXXPSASA

SEQ ID NO: 12596 - protein, 20 aa, Artificial Sequence
  Cyclic GFR-binding peptide
  MOD_RES (14), (15): Xaa is C or S
KYLVSIPSLKTPAXXPKPVH

SEQ ID NO: 12597 - protein, 25 aa, Artificial Sequence
  Cyclic GFR-binding peptide
  MOD_RES (19), (20): Xaa is C or S
NSSDDYYLVSTASLKTPAXXPKPVH

SEQ ID NO: 12598 - protein, 23 aa, Artificial Sequence
  Cyclic GFR-binding peptide
  MOD_RES (17), (18): Xaa is C or S
AADYYLISTASLRAPVXXSAPAA

SEQ ID NO: 12599 - protein, 22 aa, Artificial Sequence
  Cyclic GFR-binding peptide
  MOD_RES (16), (17): Xaa is C or S
DNLYLMSIPEMKTPTXXPGASG

SEQ ID NO: 12600 - protein, 15 aa, Artificial Sequence
  Cyclic GFR-binding peptide
LLVRGNDYYLMSTAS

SEQ ID NO: 12601 - protein, 18 aa, Artificial Sequence
  Cyclic GFR-binding peptide
IIQQKDNYYLMSTASMKT

SEQ ID NO: 12602 - protein, 14 aa, Artificial Sequence
  Cyclic GFR-binding peptide
  MOD_RES (14), (14): Xaa is C or S
FYLINIPSLAQPVX

SEQ ID NO: 12603 - protein, 17 aa, Artificial Sequence
  Cyclic GFR-binding peptide
  MOD_RES (14), (15): Xaa is C or S
YYLISTASLRTPVXXTP

SEQ ID NO: 12604 - protein, 27 aa, Artificial Sequence
  Cyclic GFR-binding peptide
  MOD_RES (21), (22): Xaa is C or S
LLVRGNDLYLMSIPETKVPAXXTSPVR

SEQ ID NO: 12605 - protein, 22 aa, Artificial Sequence
  Cyclic GFR-binding peptide
  MOD_RES (16), (17): Xaa is C or S
EDFYLINIPSMKEPVXXPEPIG

SEQ ID NO: 12606 - protein, 18 aa, Artificial Sequence
  Cyclic GFR-binding peptide
  MOD_RES (14), (15): Xaa is C or S
FYLINIPSLDQSVXXPSA

SEQ ID NO: 12607 - protein, 18 aa, Artificial Sequence
  Cyclic GFR-binding peptide
  MOD_RES (14), (15): Xaa is C or S
KYLISIPSLRTPVXXTPP

SEQ ID NO: 12608 - protein, 16 aa, Artificial Sequence
  Cyclic GFR-binding peptide
LLVRGNDKYLMSIPST

SEQ ID NO: 12609 - protein, 25 aa, Artificial Sequence
  Cyclic GFR-binding peptide
  MOD_RES (19), (20): Xaa is C or S
PKRGVFYLINIPSLAQPVXXPAASA

SEQ ID NO: 12610 - protein, 27 aa, Artificial Sequence
  Cyclic GFR-binding peptide
  MOD_RES (21), (22): Xaa is C or S
IIQQKDNYYLMSTASMKTPTXXPGASG

SEQ ID NO: 12611 - protein, 16 aa, Artificial Sequence
  Cyclic GFR-binding peptide
  MOD_RES (14), (15): Xaa is C or S
FYLISIANMKEPVXXP

SEQ ID NO: 12612 - protein, 27 aa, Artificial Sequence
  Cyclic GFR-binding peptide
  MOD_RES (21), (22): Xaa is C or S
IVNSSDDLYLVSIPELKTPAXXPKPVH

SEQ ID NO: 12613 - protein, 20 aa, Artificial Sequence
  Cyclic GFR-binding peptide
  MOD_RES (14), (15): Xaa is C or S
KYLISIPSLRTPVXXTPPTS

SEQ ID NO: 12614 - protein, 22 aa, Artificial Sequence
  Cyclic GFR-binding peptide
  MOD_RES (16), (17): Xaa is C or S
EDKYLISIPSMKEPVXXPEPIG

SEQ ID NO: 12615 - protein, 15 aa, Artificial Sequence
  Cyclic GFR-binding peptide
VKPKRGVFYLINIPS

SEQ ID NO: 12616 - protein, 14 aa, Artificial Sequence
  Cyclic GFR-binding peptide
  MOD_RES (14), (14): Xaa is C or S
FYLINIPSLDQSVX

SEQ ID NO: 12617 - protein, 27 aa, Artificial Sequence
  Cyclic GFR-binding peptide
  MOD_RES (21), (22): Xaa is C or S
VVNKNEDYYLISTASMKEPVXXPEPIG

SEQ ID NO: 12618 - protein, 23 aa, Artificial Sequence
  Cyclic GFR-binding peptide
  MOD_RES (17), (18): Xaa is C or S
ASDLYLISIPELRTPVXXTPPTS

SEQ ID NO: 12619 - protein, 21 aa, Artificial Sequence
  Cyclic GFR-binding peptide
  MOD_RES (15), (16): Xaa is C or S
DLYLMSIPETKVPAXXTSPVR

SEQ ID NO: 12620 - protein, 17 aa, Artificial Sequence
  Cyclic GFR-binding peptide
VVNKNEDYYLISTASMK

SEQ ID NO: 12621 - protein, 16 aa, Artificial Sequence
  Cyclic GFR-binding peptide
LLVRGNDLYLMSIPET

SEQ ID NO: 12622 - protein, 22 aa, Artificial Sequence
  Cyclic GFR-binding peptide
  MOD_RES (16), (17): Xaa is C or S
EDLYLISIPEMKEPVXXPEPIG

SEQ ID NO: 12623 - protein, 17 aa, Artificial Sequence
  Cyclic GFR-binding peptide
  MOD_RES (14), (15): Xaa is C or S
YYLISTASLRAPVXXSA

SEQ ID NO: 12624 - protein, 22 aa, Artificial Sequence
  Cyclic GFR-binding peptide
  MOD_RES (16), (17): Xaa is C or S
GVFYLINIPSLAQPVXXPAASA

SEQ ID NO: 12625 - protein, 21 aa, Artificial Sequence
  Cyclic GFR-binding peptide
  MOD_RES (15), (16): Xaa is C or S
DYYLISTASLRTPVXXTPPTS

SEQ ID NO: 12626 - protein, 27 aa, Artificial Sequence
  Cyclic GFR-binding peptide
  MOD_RES (21), (22): Xaa is C or S
VVNNASDLYLISIPELRTPVXXTPPTS

SEQ ID NO: 12627 - protein, 19 aa, Artificial Sequence
  Cyclic GFR-binding peptide
  MOD_RES (14), (15): Xaa is C or S
FYLINIPSLDQSVXXPSAS

SEQ ID NO: 12628 - protein, 21 aa, Artificial Sequence
  Cyclic GFR-binding peptide
  MOD_RES (15), (16): Xaa is C or S
DLYLISIPELRTPVXXTPPTS

SEQ ID NO: 12629 - protein, 26 aa, Artificial Sequence
  Cyclic GFR-binding peptide
  MOD_RES (20), (21): Xaa is C or S
VNNASDLYLISIPELRTPVXXTPPTS

SEQ ID NO: 12630 - protein, 18 aa, Artificial Sequence
  Cyclic GFR-binding peptide
VVNKNEDFYLISIANMKE

SEQ ID NO: 12631 - protein, 20 aa, Artificial Sequence
  Cyclic GFR-binding peptide
  MOD_RES (14), (15): Xaa is C or S
FYLISIANMKEPVXXPEPIG

SEQ ID NO: 12632 - protein, 17 aa, Artificial Sequence
  Cyclic GFR-binding peptide
  MOD_RES (14), (15): Xaa is C or S
KYLISIPSMKEPVXXPE

SEQ ID NO: 12633 - protein, 19 aa, Artificial Sequence
  Cyclic GFR-binding peptide
VVNKNEDYYLISTASMKEP

SEQ ID NO: 12634 - protein, 13 aa, Artificial Sequence
  Cyclic GFR-binding peptide
FYLINIPSLAQPV

SEQ ID NO: 12635 - protein, 16 aa, Artificial Sequence
  Cyclic GFR-binding peptide
VVNNASDLYLISIPEL

SEQ ID NO: 12636 - protein, 15 aa, Artificial Sequence
  Cyclic GFR-binding peptide
IKPTKGIFYLINIPS

SEQ ID NO: 12637 - protein, 16 aa, Artificial Sequence
  Cyclic GFR-binding peptide
VVNKNEDKYLISIPSM

SEQ ID NO: 12638 - protein, 21 aa, Artificial Sequence
  Cyclic GFR-binding peptide
  MOD_RES (15), (16): Xaa is C or S
DYYLMSTASTKVPAXXTSPVR

SEQ ID NO: 12639 - protein, 18 aa, Artificial Sequence
  Cyclic GFR-binding peptide
IKPTKGIFYLINIPSLDQ

SEQ ID NO: 12640 - protein, 26 aa, Artificial Sequence
  Cyclic GFR-binding peptide
  MOD_RES (20), (21): Xaa is C or S
VNSSDDLYLVSIPELKTPAXXPKPVH

SEQ ID NO: 12641 - protein, 26 aa, Artificial Sequence
  Cyclic GFR-binding peptide
  MOD_RES (20), (21): Xaa is C or S
VNNAADYYLISTASLRAPVXXSAPAA

SEQ ID NO: 12642 - protein, 17 aa, Artificial Sequence
  Cyclic GFR-binding peptide
  MOD_RES (14), (15): Xaa is C or S
LYLISIPELRTPVXXTP

SEQ ID NO: 12643 - protein, 13 aa, Artificial Sequence
  Cyclic GFR-binding peptide
KYLMSIPSMKTPT

SEQ ID NO: 12644 - protein, 25 aa, Artificial Sequence
  Cyclic GFR-binding peptide
  MOD_RES (19), (20): Xaa is C or S
PTKGIFYLINIPSLDQSVXXPSASA

SEQ ID NO: 12645 - protein, 26 aa, Artificial Sequence
  Cyclic GFR-binding peptide
  MOD_RES (20), (21): Xaa is C or S
VNKNEDFYLINIPSMKEPVXXPEPIG

SEQ ID NO: 12646 - protein, 13 aa, Artificial Sequence
  Cyclic GFR-binding peptide
FYLINIPSLDQSV

SEQ ID NO: 12647 - protein, 19 aa, Artificial Sequence
  Cyclic GFR-binding peptide
LLVRGNDLYLMSIPETKVP

SEQ ID NO: 12648 - protein, 22 aa, Artificial Sequence
  Cyclic GFR-binding peptide
  MOD_RES (16), (17): Xaa is C or S
KDYYLISTASLKTPVXXAKSAK

SEQ ID NO: 12649 - protein, 22 aa, Artificial Sequence
  Cyclic GFR-binding peptide
  MOD_RES (16), (17): Xaa is C or S
EDFYLISIANMKEPVXXPEPIG

SEQ ID NO: 12650 - protein, 27 aa, Artificial Sequence
  Cyclic GFR-binding peptide
  MOD_RES (21), (22): Xaa is C or S
LLVRGNDKYLMSIPSTKVPAXXTSPVR

SEQ ID NO: 12651 - protein, 26 aa, Artificial Sequence
  Cyclic GFR-binding peptide
  MOD_RES (20), (21): Xaa is C or S
LVRGNDLYLMSIPETKVPAXXTSPVR

SEQ ID NO: 12652 - protein, 19 aa, Artificial Sequence
  Cyclic GFR-binding peptide
  MOD_RES (14), (15): Xaa is C or S
FYLISIANMKEPVXXPEPI

SEQ ID NO: 12653 - protein, 19 aa, Artificial Sequence
  Cyclic GFR-binding peptide
IKPTKGIFYLINIPSLDQS

SEQ ID NO: 12654 - protein, 18 aa, Artificial Sequence
  Cyclic GFR-binding peptide
  MOD_RES (14), (15): Xaa is C or S
KYLISIPSMKEPVXXPEP

SEQ ID NO: 12655 - protein, 14 aa, Artificial Sequence
  Cyclic GFR-binding peptide
  MOD_RES (14), (14): Xaa is C or S
YYLISTASLKTPVX

SEQ ID NO: 12656 - protein, 25 aa, Artificial Sequence
  Cyclic GFR-binding peptide
  MOD_RES (19), (20): Xaa is C or S
VRGNDLYLMSIPETKVPAXXTSPVR

SEQ ID NO: 12657 - protein, 27 aa, Artificial Sequence
  Cyclic GFR-binding peptide
  MOD_RES (21), (22): Xaa is C or S
IVNSSDDKYLVSIPSLKTPAXXPKPVH

SEQ ID NO: 12658 - protein, 17 aa, Artificial Sequence
  Cyclic GFR-binding peptide
  MOD_RES (14), (15): Xaa is C or S
YYLISTASMKEPVXXPE

SEQ ID NO: 12659 - protein, 14 aa, Artificial Sequence
  Cyclic GFR-binding peptide
  MOD_RES (14), (14): Xaa is C or S
FYLISIANMKEPVX

SEQ ID NO: 12660 - protein, 17 aa, Artificial Sequence
  Cyclic GFR-binding peptide
  MOD_RES (14), (15): Xaa is C or S
YYLISTASLKTPVXXAK

SEQ ID NO: 12661 - protein, 13 aa, Artificial Sequence
  Cyclic GFR-binding peptide
YYLISTASLRAPV

SEQ ID NO: 12662 - protein, 23 aa, Artificial Sequence
  Cyclic GFR-binding peptide
  MOD_RES (17), (18): Xaa is C or S
RGVFYLINIPSLDQPVXXPSASA

SEQ ID NO: 12663 - protein, 19 aa, Artificial Sequence
  Cyclic GFR-binding peptide
  MOD_RES (14), (15): Xaa is C or S
LYLISIPEMKEPVXXPEPI

SEQ ID NO: 12664 - protein, 24 aa, Artificial Sequence
  Cyclic GFR-binding peptide
  MOD_RES (18), (19): Xaa is C or S
KNEDKYLISIPSMKEPVXXPEPIG

SEQ ID NO: 12665 - protein, 16 aa, Artificial Sequence
  Cyclic GFR-binding peptide
  MOD_RES (14), (15): Xaa is C or S
KYLISIPSLRTPVXXT

SEQ ID NO: 12666 - protein, 16 aa, Artificial Sequence
  Cyclic GFR-binding peptide
VVNKNEDFYLISIANM

SEQ ID NO: 12667 - protein, 23 aa, Artificial Sequence
  Cyclic GFR-binding peptide
  MOD_RES (17), (18): Xaa is C or S
SDDYYLVSTASLKTPAXXPKPVH

SEQ ID NO: 12668 - protein, 24 aa, Artificial Sequence
  Cyclic GFR-binding peptide
  MOD_RES (18), (19): Xaa is C or S
NASDKYLISIPSLRTPVXXTPPTS

SEQ ID NO: 12669 - protein, 24 aa, Artificial Sequence
  Cyclic GFR-binding peptide
  MOD_RES (18), (19): Xaa is C or S
TRGVFYLINIPSLDQPVXXPSASA

SEQ ID NO: 12670 - protein, 15 aa, Artificial Sequence
  Cyclic GFR-binding peptide
  MOD_RES (14), (15): Xaa is C or S
YYLISTASLKTPVXX

SEQ ID NO: 12671 - protein, 25 aa, Artificial Sequence
  Cyclic GFR-binding peptide
  MOD_RES (19), (20): Xaa is C or S
NKNEDFYLISIANMKEPVXXPEPIG

SEQ ID NO: 12672 - protein, 17 aa, Artificial Sequence
  Cyclic GFR-binding peptide
LLVRGNDYYLMSTASTK

SEQ ID NO: 12673 - protein, 16 aa, Artificial Sequence
  Cyclic GFR-binding peptide
  MOD_RES (14), (15): Xaa is C or S
LYLMSIPEMKTPTXXP

SEQ ID NO: 12674 - protein, 20 aa, Artificial Sequence
  Cyclic GFR-binding peptide
  MOD_RES (14), (15): Xaa is C or S
YYLISTASLKTPVXXAKSAK

SEQ ID NO: 12675 - protein, 24 aa, Artificial Sequence
  Cyclic GFR-binding peptide
  MOD_RES (18), (19): Xaa is C or S
VGKDYYLISTASLKTPVXXAKSAK

SEQ ID NO: 12676 - protein, 23 aa, Artificial Sequence
  Cyclic GFR-binding peptide
  MOD_RES (17), (18): Xaa is C or S
SDDKYLVSIPSLKTPAXXPKPVH

SEQ ID NO: 12677 - protein, 19 aa, Artificial Sequence
  Cyclic GFR-binding peptide
  MOD_RES (14), (15): Xaa is C or S
YYLISTASMKEPVXXPEPI

SEQ ID NO: 12678 - protein, 18 aa, Artificial Sequence
  Cyclic GFR-binding peptide
  MOD_RES (14), (15): Xaa is C or S
YYLISTASLRTPVXXTPP

SEQ ID NO: 12679 - protein, 22 aa, Artificial Sequence
  Cyclic GFR-binding peptide
  MOD_RES (16), (17): Xaa is C or S
EDYYLISTASMKEPVXXPEPIG

SEQ ID NO: 12680 - protein, 17 aa, Artificial Sequence
  Cyclic GFR-binding peptide
IKPTKGIFYLINIPSLD

SEQ ID NO: 12681 - protein, 17 aa, Artificial Sequence
  Cyclic GFR-binding peptide
  MOD_RES (14), (15): Xaa is C or S
LYLISIPEMKEPVXXPE

SEQ ID NO: 12682 - protein, 26 aa, Artificial Sequence
  Cyclic GFR-binding peptide
  MOD_RES (20), (21): Xaa is C or S
VNSSDDKYLVSIPSLKTPAXXPKPVH

SEQ ID NO: 12683 - protein, 19 aa, Artificial Sequence
  Cyclic GFR-binding peptide
VKPKRGVFYLINIPSLAQP

SEQ ID NO: 12684 - protein, 26 aa, Artificial Sequence
  Cyclic GFR-binding peptide
  MOD_RES (20), (21): Xaa is C or S
KPKRGVFYLINIPSLAQPVXXPAASA

SEQ ID NO: 12685 - protein, 17 aa, Artificial Sequence
  Cyclic GFR-binding peptide
IIQQKDNKYLMSIPSMK

SEQ ID NO: 12686 - protein, 17 aa, Artificial Sequence
  Cyclic GFR-binding peptide
VVNNASDLYLISIPELR

SEQ ID NO: 12687 - protein, 18 aa, Artificial Sequence
  Cyclic GFR-binding peptide
VKPTRGVFYLINIPSLDQ

SEQ ID NO: 12688 - protein, 17 aa, Artificial Sequence
  Cyclic GFR-binding peptide
  MOD_RES (14), (15): Xaa is C or S
KYLMSIPSMKTPTXXPG

SEQ ID NO: 12689 - protein, 20 aa, Artificial Sequence
  Cyclic GFR-binding peptide
  MOD_RES (14), (15): Xaa is C or S
LYLISIPEMKEPVXXPEPIG

SEQ ID NO: 12690 - protein, 19 aa, Artificial Sequence
  Cyclic GFR-binding peptide
  MOD_RES (14), (15): Xaa is C or S
KYLISIPSLRTPVXXTPPT

SEQ ID NO: 12691 - protein, 25 aa, Artificial Sequence
  Cyclic GFR-binding peptide
  MOD_RES (19), (20): Xaa is C or S
NKNEDKYLISIPSMKEPVXXPEPIG

SEQ ID NO: 12692 - protein, 17 aa, Artificial Sequence
  Cyclic GFR-binding peptide
IIQQKDNLYLMSIPEMK

SEQ ID NO: 12693 - protein, 17 aa, Artificial Sequence
  Cyclic GFR-binding peptide
VKPKRGVFYLINIPSLA

SEQ ID NO: 12694 - protein, 17 aa, Artificial Sequence
  Cyclic GFR-binding peptide
VVNNASDKYLISIPSLR

SEQ ID NO: 12695 - protein, 24 aa, Artificial Sequence
  Cyclic GFR-binding peptide
  MOD_RES (18), (19): Xaa is C or S
SSDDKYLVSIPSLKTPAXXPKPVH

SEQ ID NO: 12696 - protein, 13 aa, Artificial Sequence
  Cyclic GFR-binding peptide
FYLISIANMKEPV

SEQ ID NO: 12697 - protein, 20 aa, Artificial Sequence
  Cyclic GFR-binding peptide
  MOD_RES (14), (15): Xaa is C or S
YYLISTASLRTPVXXTPPTS

SEQ ID NO: 12698 - protein, 15 aa, Artificial Sequence
  Cyclic GFR-binding peptide
VVNKNEDYYLISTAS

SEQ ID NO: 12699 - protein, 23 aa, Artificial Sequence
  Cyclic GFR-binding peptide
  MOD_RES (17), (18): Xaa is C or S
SDDLYLVSIPELKTPAXXPKPVH

SEQ ID NO: 12700 - protein, 23 aa, Artificial Sequence
  Cyclic GFR-binding peptide
  MOD_RES (17), (18): Xaa is C or S
NEDKYLISIPSMKEPVXXPEPIG

SEQ ID NO: 12701 - protein, 16 aa, Artificial Sequence
  Cyclic GFR-binding peptide
IIQQKDNLYLMSIPEM

SEQ ID NO: 12702 - protein, 26 aa, Artificial Sequence
  Cyclic GFR-binding peptide
  MOD_RES (20), (21): Xaa is C or S
LVRGNDYYLMSTASTKVPAXXTSPVR

SEQ ID NO: 12703 - protein, 17 aa, Artificial Sequence
  Cyclic GFR-binding peptide
  MOD_RES (14), (15): Xaa is C or S
FYLINIPSMKEPVXXPE

SEQ ID NO: 12704 - protein, 19 aa, Artificial Sequence
  Cyclic GFR-binding peptide
IIQQKDNLYLMSIPEMKTP

SEQ ID NO: 12705 - protein, 24 aa, Artificial Sequence
  Cyclic GFR-binding peptide
  MOD_RES (18), (19): Xaa is C or S
SSDDLYLVSIPELKTPAXXPKPVH

SEQ ID NO: 12706 - protein, 21 aa, Artificial Sequence
  Cyclic GFR-binding peptide
  MOD_RES (15), (16): Xaa is C or S
NLYLMSIPEMKTPTXXPGASG

SEQ ID NO: 12707 - protein, 13 aa, Artificial Sequence
  Cyclic GFR-binding peptide
KYLISIPSLRTPV

SEQ ID NO: 12708 - protein, 15 aa, Artificial Sequence
  Cyclic GFR-binding peptide
VVNNAADYYLISTAS

SEQ ID NO: 12709 - protein, 19 aa, Artificial Sequence
  Cyclic GFR-binding peptide
  MOD_RES (14), (15): Xaa is C or S
YYLISTASLKTPVXXAKSA

SEQ ID NO: 12710 - protein, 24 aa, Artificial Sequence
  Cyclic GFR-binding peptide
  MOD_RES (18), (19): Xaa is C or S
QKDNYYLMSTASMKTPTXXPGASG

SEQ ID NO: 12711 - protein, 18 aa, Artificial Sequence
  Cyclic GFR-binding peptide
VVNKNEDKYLISIPSMKE

SEQ ID NO: 12712 - protein, 25 aa, Artificial Sequence
  Cyclic GFR-binding peptide
  MOD_RES (19), (20): Xaa is C or S
NSSDDKYLVSIPSLKTPAXXPKPVH

SEQ ID NO: 12713 - protein, 19 aa, Artificial Sequence
  Cyclic GFR-binding peptide
VVNNASDLYLISIPELRTP

SEQ ID NO: 12714 - protein, 17 aa, Artificial Sequence
  Cyclic GFR-binding peptide
  MOD_RES (14), (15): Xaa is C or S
KYLISIPSLRTPVXXTP

SEQ ID NO: 12715 - protein, 15 aa, Artificial Sequence
  Cyclic GFR-binding peptide
  MOD_RES (14), (15): Xaa is C or S
YYLMSTASMKTPTXX

SEQ ID NO: 12716 - protein, 17 aa, Artificial Sequence
  Cyclic GFR-binding peptide
VVNNASDYYLISTASLR

SEQ ID NO: 12717 - protein, 23 aa, Artificial Sequence
  Cyclic GFR-binding peptide
  MOD_RES (17), (18): Xaa is C or S
GNDKYLMSIPSTKVPAXXTSPVR

SEQ ID NO: 12718 - protein, 23 aa, Artificial Sequence
  Cyclic GFR-binding peptide
  MOD_RES (17), (18): Xaa is C or S
NEDYYLISTASMKEPVXXPEPIG

SEQ ID NO: 12719 - protein, 15 aa, Artificial Sequence
  Cyclic GFR-binding peptide
  MOD_RES (14), (15): Xaa is C or S
FYLINIPSLAQPVXX

SEQ ID NO: 12720 - protein, 19 aa, Artificial Sequence
  Cyclic GFR-binding peptide
LLVRGNDKYLMSIPSTKVP

SEQ ID NO: 12721 - protein, 27 aa, Artificial Sequence
  Cyclic GFR-binding peptide
  MOD_RES (21), (22): Xaa is C or S
VKPKRGVFYLINIPSLAQPVXXPAASA

SEQ ID NO: 12722 - protein, 24 aa, Artificial Sequence
  Cyclic GFR-binding peptide
  MOD_RES (18), (19): Xaa is C or S
SSDDYYLVSTASLKTPAXXPKPVH

SEQ ID NO: 12723 - protein, 17 aa, Artificial Sequence
  Cyclic GFR-binding peptide
VVNKNEDKYLISIPSMK

SEQ ID NO: 12724 - protein, 18 aa, Artificial Sequence
  Cyclic GFR-binding peptide
  MOD_RES (14), (15): Xaa is C or S
YYLISTASLRAPVXXSAP

SEQ ID NO: 12725 - protein, 18 aa, Artificial Sequence
  Cyclic GFR-binding peptide
VVNNASDLYLISIPELRT

SEQ ID NO: 12726 - protein, 18 aa, Artificial Sequence
  Cyclic GFR-binding peptide
  MOD_RES (14), (15): Xaa is C or S
FYLINIPSLAQPVXXPAA

SEQ ID NO: 12727 - protein, 15 aa, Artificial Sequence
  Cyclic GFR-binding peptide
  MOD_RES (14), (15): Xaa is C or S
FYLINIPSMKEPVXX

SEQ ID NO: 12728 - protein, 25 aa, Artificial Sequence
  Cyclic GFR-binding peptide
  MOD_RES (19), (20): Xaa is C or S
NKNEDLYLISIPEMKEPVXXPEPIG

SEQ ID NO: 12729 - protein, 23 aa, Artificial Sequence
  Cyclic GFR-binding peptide
  MOD_RES (17), (18): Xaa is C or S
ASDKYLISIPSLRTPVXXTPPTS

SEQ ID NO: 12730 - protein, 26 aa, Artificial Sequence
  Cyclic GFR-binding peptide
  MOD_RES (20), (21): Xaa is C or S
VNKNEDYYLISTASMKEPVXXPEPIG

SEQ ID NO: 12731 - protein, 18 aa, Artificial Sequence
  Cyclic GFR-binding peptide
IIQQKDNLYLMSIPEMKT

SEQ ID NO: 12732 - protein, 17 aa, Artificial Sequence
  Cyclic GFR-binding peptide
LLVRGNDKYLMSIPSTK

SEQ ID NO: 12733 - protein, 20 aa, Artificial Sequence
  Cyclic GFR-binding peptide
  MOD_RES (14), (15): Xaa is C or S
KYLISIPSMKEPVXXPEPIG

SEQ ID NO: 12734 - protein, 27 aa, Artificial Sequence
  Cyclic GFR-binding peptide
  MOD_RES (21), (22): Xaa is C or S
VVNNASDKYLISIPSLRTPVXXTPPTS

SEQ ID NO: 12735 - protein, 23 aa, Artificial Sequence
  Cyclic GFR-binding peptide
  MOD_RES (17), (18): Xaa is C or S
GKDYYLISTASLKTPVXXAKSAK

SEQ ID NO: 12736 - protein, 17 aa, Artificial Sequence
  Cyclic GFR-binding peptide
IIQQKDNYYLMSTASMK

SEQ ID NO: 12737 - protein, 21 aa, Artificial Sequence
  Cyclic GFR-binding peptide
  MOD_RES (15), (16): Xaa is C or S
VFYLINIPSLDQPVXXPSASA

SEQ ID NO: 12738 - protein, 24 aa, Artificial Sequence
  Cyclic GFR-binding peptide
  MOD_RES (18), (19): Xaa is C or S
QKDNLYLMSIPEMKTPTXXPGASG

SEQ ID NO: 12739 - protein, 24 aa, Artificial Sequence
  Cyclic GFR-binding peptide
  MOD_RES (18), (19): Xaa is C or S
QKDNKYLMSIPSMKTPTXXPGASG

SEQ ID NO: 12740 - protein, 27 aa, Artificial Sequence
  Cyclic GFR-binding peptide
  MOD_RES (21), (22): Xaa is C or S
LLVRGNDYYLMSTASTKVPAXXTSPVR

SEQ ID NO: 12741 - protein, 23 aa, Artificial Sequence
  Cyclic GFR-binding peptide
  MOD_RES (17), (18): Xaa is C or S
GNDYYLMSTASTKVPAXXTSPVR

SEQ ID NO: 12742 - protein, 23 aa, Artificial Sequence
  Cyclic GFR-binding peptide
  MOD_RES (17), (18): Xaa is C or S
RGVFYLINIPSLAQPVXXPAASA

SEQ ID NO: 12743 - protein, 18 aa, Artificial Sequence
  Cyclic GFR-binding peptide
VKPKRGVFYLINIPSLAQ

SEQ ID NO: 12744 - protein, 16 aa, Artificial Sequence
  Cyclic GFR-binding peptide
VVNKNEDLYLISIPEM

SEQ ID NO: 12745 - protein, 14 aa, Artificial Sequence
  Cyclic GFR-binding peptide
  MOD_RES (14), (14): Xaa is C or S
YYLMSTASMKTPTX

SEQ ID NO: 12746 - protein, 15 aa, Artificial Sequence
  Cyclic GFR-binding peptide
  MOD_RES (14), (15): Xaa is C or S
KYLMSIPSMKTPTXX

SEQ ID NO: 12747 - protein, 16 aa, Artificial Sequence
  Cyclic GFR-binding peptide
  MOD_RES (14), (15): Xaa is C or S
FYLINIPSLDQSVXXP

SEQ ID NO: 12748 - protein, 27 aa, Artificial Sequence
  Cyclic GFR-binding peptide
  MOD_RES (21), (22): Xaa is C or S
IVNSSDDYYLVSTASLKTPAXXPKPVH

SEQ ID NO: 12749 - protein, 23 aa, Artificial Sequence
  Cyclic GFR-binding peptide
  MOD_RES (17), (18): Xaa is C or S
KDNYYLMSTASMKTPTXXPGASG

SEQ ID NO: 12750 - protein, 21 aa, Artificial Sequence
  Cyclic GFR-binding peptide
  MOD_RES (15), (16): Xaa is C or S
DKYLMSIPSTKVPAXXTSPVR

SEQ ID NO: 12751 - protein, 23 aa, Artificial Sequence
  Cyclic GFR-binding peptide
  MOD_RES (17), (18): Xaa is C or S
KDNKYLMSIPSMKTPTXXPGASG

SEQ ID NO: 12752 - protein, 16 aa, Artificial Sequence
  Cyclic GFR-binding peptide
VVNNASDKYLISIPSL

SEQ ID NO: 12753 - protein, 24 aa, Artificial Sequence
  Cyclic GFR-binding peptide
  MOD_RES (18), (19): Xaa is C or S
NAADYYLISTASLRAPVXXSAPAA

SEQ ID NO: 12754 - protein, 15 aa, Artificial Sequence
  Cyclic GFR-binding peptide
VVNKNEDKYLISIPS

SEQ ID NO: 12755 - protein, 19 aa, Artificial Sequence
  Cyclic GFR-binding peptide
VVNKNEDKYLISIPSMKEP

SEQ ID NO: 12756 - protein, 21 aa, Artificial Sequence
  Cyclic GFR-binding peptide
  MOD_RES (15), (16): Xaa is C or S
DFYLISIANMKEPVXXPEPIG

SEQ ID NO: 12757 - protein, 21 aa, Artificial Sequence
  Cyclic GFR-binding peptide
  MOD_RES (15), (16): Xaa is C or S
DLYLVSIPELKTPAXXPKPVH

SEQ ID NO: 12758 - protein, 17 aa, Artificial Sequence
  Cyclic GFR-binding peptide
  MOD_RES (14), (15): Xaa is C or S
FYLINIPSLDQSVXXPS

SEQ ID NO: 12759 - protein, 16 aa, Artificial Sequence
  Cyclic GFR-binding peptide
LLVRGNDYYLMSTAST

SEQ ID NO: 12760 - protein, 20 aa, Artificial Sequence
  Cyclic GFR-binding peptide
  MOD_RES (14), (15): Xaa is C or S
FYLINIPSLDQPVXXPSASA

SEQ ID NO: 12761 - protein, 15 aa, Artificial Sequence
  Cyclic GFR-binding peptide
IIQQKDNYYLMSTAS

SEQ ID NO: 12762 - protein, 19 aa, Artificial Sequence
  Cyclic GFR-binding peptide
  MOD_RES (14), (15): Xaa is C or S
FYLINIPSLAQPVXXPAAS

SEQ ID NO: 12763 - protein, 22 aa, Artificial Sequence
  Cyclic GFR-binding peptide
  MOD_RES (16), (17): Xaa is C or S
GIFYLINIPSLDQSVXXPSASA

SEQ ID NO: 12764 - protein, 14 aa, Artificial Sequence
  Cyclic GFR-binding peptide
  MOD_RES (14), (14): Xaa is C or S
KYLMSIPSMKTPTX

SEQ ID NO: 12765 - protein, 21 aa, Artificial Sequence
  Cyclic GFR-binding peptide
  MOD_RES (15), (16): Xaa is C or S
IFYLINIPSLDQSVXXPSASA

SEQ ID NO: 12766 - protein, 14 aa, Artificial Sequence
  Cyclic GFR-binding peptide
  MOD_RES (14), (14): Xaa is C or S
FYLINIPSMKEPVX

SEQ ID NO: 12767 - protein, 16 aa, Artificial Sequence
  Cyclic GFR-binding peptide
LSATSILYYDSANNVV

SEQ ID NO: 12768 - protein, 13 aa, Artificial Sequence
  Cyclic GFR-binding peptide
VPTRLSATSILYY

SEQ ID NO: 12769 - protein, 24 aa, Artificial Sequence
  Cyclic GFR-binding peptide
  MOD_RES (6), (7): Xaa is C or S
GIPEPXXVPEKMSPINILYFDENK

SEQ ID NO: 12770 - protein, 14 aa, Artificial Sequence
  Cyclic GFR-binding peptide
  MOD_RES (1), (1): Xaa is C or S
XVPEKMSATSILYY

SEQ ID NO: 12771 - protein, 18 aa, Artificial Sequence
  Cyclic GFR-binding peptide
  MOD_RES (4), (5): Xaa is C or S
PEPXXVPEKMSPINILYF

SEQ ID NO: 12772 - protein, 19 aa, Artificial Sequence
  Cyclic GFR-binding peptide
  MOD_RES (5), (6): Xaa is C or S
VPSTXXAPVKTSATSMLYY

SEQ ID NO: 12773 - protein, 21 aa, Artificial Sequence
  Cyclic GFR-binding peptide
  MOD_RES (6), (7): Xaa is C or S
GIPEPXXVPEKMEPISILYLD

SEQ ID NO: 12774 - protein, 16 aa, Artificial Sequence
  Cyclic GFR-binding peptide
  MOD_RES (2), (3): Xaa is C or S
PXXVPEKMSPISILYK

SEQ ID NO: 12775 - protein, 15 aa, Artificial Sequence
  Cyclic GFR-binding peptide
SPISMLYKNDKQQII

SEQ ID NO: 12776 - protein, 27 aa, Artificial Sequence
  Cyclic GFR-binding peptide
  MOD_RES (6), (7): Xaa is C or S
GSAGPXXTPTKMSPISMLYKNDKQQII

SEQ ID NO: 12777 - protein, 24 aa, Artificial Sequence
  Cyclic GFR-binding peptide
  MOD_RES (6), (7): Xaa is C or S
STPPTXXVPTRLEPISILYLDSAN

SEQ ID NO: 12778 - protein, 27 aa, Artificial Sequence
  Cyclic GFR-binding peptide
  MOD_RES (6), (7): Xaa is C or S
GIPEPXXVPEKMSPISILYKDENKNVV

SEQ ID NO: 12779 - protein, 24 aa, Artificial Sequence
  Cyclic GFR-binding peptide
  MOD_RES (6), (7): Xaa is C or S
GIPEPXXVPEKMSATSILYYDENK

SEQ ID NO: 12780 - protein, 25 aa, Artificial Sequence
  Cyclic GFR-binding peptide
  MOD_RES (6), (7): Xaa is C or S
GIPEPXXVPEKMSATSILYYDENKN

SEQ ID NO: 12781 - protein, 14 aa, Artificial Sequence
  Cyclic GFR-binding peptide
  MOD_RES (1), (1): Xaa is C or S
XVPQDLSPINILYF

SEQ ID NO: 12782 - protein, 21 aa, Artificial Sequence
  Cyclic GFR-binding peptide
  MOD_RES (6), (7): Xaa is C or S
GSAGPXXTPTKMSATSMLYYN

SEQ ID NO: 12783 - protein, 17 aa, Artificial Sequence
  Cyclic GFR-binding peptide
  MOD_RES (3), (4): Xaa is C or S
APXXVPQALSPINILYF

SEQ ID NO: 12784 - protein, 17 aa, Artificial Sequence
  Cyclic GFR-binding peptide
  MOD_RES (3), (4): Xaa is C or S
GPXXTPTKMSATSMLYY

SEQ ID NO: 12785 - protein, 19 aa, Artificial Sequence
  Cyclic GFR-binding peptide
PVKTSATSMLYYDNGRVLL

SEQ ID NO: 12786 - protein, 22 aa, Artificial Sequence
  Cyclic GFR-binding peptide
  MOD_RES (6), (7): Xaa is C or S
ASASPXXVPQDLSPINILYFVG

SEQ ID NO: 12787 - protein, 17 aa, Artificial Sequence
  Cyclic GFR-binding peptide
  MOD_RES (3), (4): Xaa is C or S
SPXXVPQDLSPINILYF

SEQ ID NO: 12788 - protein, 15 aa, Artificial Sequence
  Cyclic GFR-binding peptide
  MOD_RES (1), (2): Xaa is C or S
XXTPTKMEPISMLYL

SEQ ID NO: 12789 - protein, 13 aa, Artificial Sequence
  Cyclic GFR-binding peptide
TPTKMEPISMLYL

SEQ ID NO: 12790 - protein, 24 aa, Artificial Sequence
  Cyclic GFR-binding peptide
  MOD_RES (6), (7): Xaa is C or S
ASASPXXVSQDLSPINILYFIGKT

SEQ ID NO: 12791 - protein, 24 aa, Artificial Sequence
  Cyclic GFR-binding peptide
  MOD_RES (6), (7): Xaa is C or S
RVPSTXXAPVKTSATSMLYYDNGR

SEQ ID NO: 12792 - protein, 15 aa, Artificial Sequence
  Cyclic GFR-binding peptide
SPISILYKDSANNVV

SEQ ID NO: 12793 - protein, 15 aa, Artificial Sequence
  Cyclic GFR-binding peptide
  MOD_RES (1), (2): Xaa is C or S
XXAPVKTSATSMLYY

SEQ ID NO: 12794 - protein, 19 aa, Artificial Sequence
  Cyclic GFR-binding peptide
  MOD_RES (5), (6): Xaa is C or S
SASPXXVPQDLSPINILYF

SEQ ID NO: 12795 - protein, 20 aa, Artificial Sequence
  Cyclic GFR-binding peptide
  MOD_RES (6), (7): Xaa is C or S
GIPEPXXVPEKMSATSILYY

SEQ ID NO: 12796 - protein, 22 aa, Artificial Sequence
  Cyclic GFR-binding peptide
  MOD_RES (6), (7): Xaa is C or S
RVPSTXXAPVKTEPISMLYLDN

SEQ ID NO: 12797 - protein, 18 aa, Artificial Sequence
  Cyclic GFR-binding peptide
  MOD_RES (4), (5): Xaa is C or S
PSTXXAPVKTEPISMLYL

SEQ ID NO: 12798 - protein, 20 aa, Artificial Sequence
  Cyclic GFR-binding peptide
  MOD_RES (6), (7): Xaa is C or S
AAPASXXVPARLSATSILYY

SEQ ID NO: 12799 - protein, 15 aa, Artificial Sequence
  Cyclic GFR-binding peptide
EPISILYLDSANNVV

SEQ ID NO: 12800 - protein, 19 aa, Artificial Sequence
  Cyclic GFR-binding peptide
PEKMSPINILYFDENKNVV

SEQ ID NO: 12801 - protein, 15 aa, Artificial Sequence
  Cyclic GFR-binding peptide
SPINILYFVGRTPKV

SEQ ID NO: 12802 - protein, 18 aa, Artificial Sequence
  Cyclic GFR-binding peptide
TRLSPISILYKDSANNVV

SEQ ID NO: 12803 - protein, 22 aa, Artificial Sequence
  Cyclic GFR-binding peptide
  MOD_RES (6), (7): Xaa is C or S
HVPKPXXAPTKLSPISVLYKDD

SEQ ID NO: 12804 - protein, 16 aa, Artificial Sequence
  Cyclic GFR-binding peptide
  MOD_RES (2), (3): Xaa is C or S
PXXTPTKMSPISMLYK

SEQ ID NO: 12805 - protein, 14 aa, Artificial Sequence
  Cyclic GFR-binding peptide
  MOD_RES (1), (1): Xaa is C or S
XVPTRLSATSILYY

SEQ ID NO: 12806 - protein, 13 aa, Artificial Sequence
  Cyclic GFR-binding peptide
APVKTSATSMLYY

SEQ ID NO: 12807 - protein, 22 aa, Artificial Sequence
  Cyclic GFR-binding peptide
  MOD_RES (6), (7): Xaa is C or S
RVPSTXXAPVKTSPISMLYKDN

SEQ ID NO: 12808 - protein, 14 aa, Artificial Sequence
  Cyclic GFR-binding peptide
  MOD_RES (1), (1): Xaa is C or S
XTPTKMEPISMLYL

SEQ ID NO: 12809 - protein, 17 aa, Artificial Sequence
  Cyclic GFR-binding peptide
KLSATSILYYDKGVVTY

SEQ ID NO: 12810 - protein, 18 aa, Artificial Sequence
  Cyclic GFR-binding peptide
  MOD_RES (4), (5): Xaa is C or S
SKAXXVPTKLSATSILYY

SEQ ID NO: 12811 - protein, 15 aa, Artificial Sequence
  Cyclic GFR-binding peptide
SPISMLYKDNGRVLL

SEQ ID NO: 12812 - protein, 22 aa, Artificial Sequence
  Cyclic GFR-binding peptide
  MOD_RES (6), (7): Xaa is C or S
HVPKPXXAPTKLEPISVLYLDD

SEQ ID NO: 12813 - protein, 15 aa, Artificial Sequence
  Cyclic GFR-binding peptide
  MOD_RES (1), (2): Xaa is C or S
XXVPTRLSATSILYY

SEQ ID NO: 12814 - protein, 17 aa, Artificial Sequence
  Cyclic GFR-binding peptide
  MOD_RES (3), (4): Xaa is C or S
EPXXVPEKMNAISILYF

SEQ ID NO: 12815 - protein, 15 aa, Artificial Sequence
  Cyclic GFR-binding peptide
EPISMLYLNDKQQII

SEQ ID NO: 12816 - protein, 14 aa, Artificial Sequence
  Cyclic GFR-binding peptide
  MOD_RES (1), (1): Xaa is C or S
XAPVKTSATSMLYY

SEQ ID NO: 12817 - protein, 16 aa, Artificial Sequence
  Cyclic GFR-binding peptide
  MOD_RES (2), (3): Xaa is C or S
TXXAPVKTEPISMLYL

SEQ ID NO: 12818 - protein, 17 aa, Artificial Sequence
  Cyclic GFR-binding peptide
KTEPISMLYLDNGRVLL

SEQ ID NO: 12819 - protein, 15 aa, Artificial Sequence
  Cyclic GFR-binding peptide
  MOD_RES (1), (2): Xaa is C or S
XXVPQDLSPINILYF

SEQ ID NO: 12820 - protein, 16 aa, Artificial Sequence
  Cyclic GFR-binding peptide
MSATSILYYDENKNVV

SEQ ID NO: 12821 - protein, 19 aa, Artificial Sequence
  Cyclic GFR-binding peptide
  MOD_RES (5), (6): Xaa is C or S
IPEPXXVPEKMSPISILYK

SEQ ID NO: 12822 - protein, 19 aa, Artificial Sequence
  Cyclic GFR-binding peptide
  MOD_RES (5), (6): Xaa is C or S
TPPTXXVPTRLSATSILYY

SEQ ID NO: 12823 - protein, 21 aa, Artificial Sequence
  Cyclic GFR-binding peptide
  MOD_RES (6), (7): Xaa is C or S
HVPKPXXAPTKLSATSVLYYD

SEQ ID NO: 12824 - protein, 20 aa, Artificial Sequence
  Cyclic GFR-binding peptide
  MOD_RES (6), (7): Xaa is C or S
RVPSTXXAPVKTSATSMLYY

SEQ ID NO: 12825 - protein, 18 aa, Artificial Sequence
  Cyclic GFR-binding peptide
  MOD_RES (4), (5): Xaa is C or S
PEPXXVPEKMEPISILYL

SEQ ID NO: 12826 - protein, 18 aa, Artificial Sequence
  Cyclic GFR-binding peptide
VKTSPISMLYKDNGRVLL

SEQ ID NO: 12827 - protein, 16 aa, Artificial Sequence
  Cyclic GFR-binding peptide
  MOD_RES (2), (3): Xaa is C or S
PXXTPTKMSATSMLYY

SEQ ID NO: 12828 - protein, 25 aa, Artificial Sequence
  Cyclic GFR-binding peptide
  MOD_RES (6), (7): Xaa is C or S
GIPEPXXVPEKMSPINILYFDENKN

SEQ ID NO: 12829 - protein, 16 aa, Artificial Sequence
  Cyclic GFR-binding peptide
  MOD_RES (2), (3): Xaa is C or S
TXXVPTRLEPISILYL

SEQ ID NO: 12830 - protein, 13 aa, Artificial Sequence
  Cyclic GFR-binding peptide
VPQDLSPINILYF

SEQ ID NO: 12831 - protein, 21 aa, Artificial Sequence
  Cyclic GFR-binding peptide
  MOD_RES (6), (7): Xaa is C or S
HVPKPXXAPTKLSPISVLYKD

SEQ ID NO: 12832 - protein, 21 aa, Artificial Sequence
  Cyclic GFR-binding peptide
  MOD_RES (6), (7): Xaa is C or S
ASAAPXXVPQALSPINILYFV

SEQ ID NO: 12833 - protein, 15 aa, Artificial Sequence
  Cyclic GFR-binding peptide
EPISILYLDENKNVV

SEQ ID NO: 12834 - protein, 14 aa, Artificial Sequence
  Cyclic GFR-binding peptide
  MOD_RES (1), (1): Xaa is C or S
XVPTRLSPISILYK

SEQ ID NO: 12835 - protein, 15 aa, Artificial Sequence
  Cyclic GFR-binding peptide
  MOD_RES (1), (2): Xaa is C or S
XXVPEKMEPISILYL

SEQ ID NO: 12836 - protein, 16 aa, Artificial Sequence
  Cyclic GFR-binding peptide
  MOD_RES (2), (3): Xaa is C or S
TXXVPTRLSATSILYY

SEQ ID NO: 12837 - protein, 25 aa, Artificial Sequence
  Cyclic GFR-binding peptide
  MOD_RES (6), (7): Xaa is C or S
STPPTXXVPTRLEPISILYLDSANN

SEQ ID NO: 12838 - protein, 18 aa, Artificial Sequence
  Cyclic GFR-binding peptide
TKMSPISMLYKNDKQQII

SEQ ID NO: 12839 - protein, 27 aa, Artificial Sequence
  Cyclic GFR-binding peptide
  MOD_RES (6), (7): Xaa is C or S
KASKAXXVPTKLSATSILYYDKGVVTY

SEQ ID NO: 12840 - protein, 19 aa, Artificial Sequence
  Cyclic GFR-binding peptide
PARLSATSILYYDAANNVV

SEQ ID NO: 12841 - protein, 24 aa, Artificial Sequence
  Cyclic GFR-binding peptide
  MOD_RES (6), (7): Xaa is C or S
GIPEPXXVPEKMNAISILYFDENK

SEQ ID NO: 12842 - protein, 13 aa, Artificial Sequence
  Cyclic GFR-binding peptide
TPTKMSATSMLYY

SEQ ID NO: 12843 - protein, 20 aa, Artificial Sequence
  Cyclic GFR-binding peptide
  MOD_RES (6), (7): Xaa is C or S
STPPTXXVPTRLEPISILYL

SEQ ID NO: 12844 - protein, 17 aa, Artificial Sequence
  Cyclic GFR-binding peptide
  MOD_RES (3), (4): Xaa is C or S
GPXXTPTKMEPISMLYL

SEQ ID NO: 12845 - protein, 18 aa, Artificial Sequence
  Cyclic GFR-binding peptide
  MOD_RES (4), (5): Xaa is C or S
AGPXXTPTKMSATSMLYY

SEQ ID NO: 12846 - protein, 19 aa, Artificial Sequence
  Cyclic GFR-binding peptide
  MOD_RES (5), (6): Xaa is C or S
VPSTXXAPVKTSPISMLYK

SEQ ID NO: 12847 - protein, 26 aa, Artificial Sequence
  Cyclic GFR-binding peptide
  MOD_RES (6), (7): Xaa is C or S
GSAGPXXTPTKMSPISMLYKNDKQQI

SEQ ID NO: 12848 - protein, 23 aa, Artificial Sequence
  Cyclic GFR-binding peptide
  MOD_RES (6), (7): Xaa is C or S
GIPEPXXVPEKMEPISILYLDEN

SEQ ID NO: 12849 - protein, 16 aa, Artificial Sequence
  Cyclic GFR-binding peptide
  MOD_RES (2), (3): Xaa is C or S
SXXVPARLSATSILYY

SEQ ID NO: 12850 - protein, 20 aa, Artificial Sequence
  Cyclic GFR-binding peptide
  MOD_RES (6), (7): Xaa is C or S
HVPKPXXAPTKLEPISVLYL

SEQ ID NO: 12851 - protein, 27 aa, Artificial Sequence
  Cyclic GFR-binding peptide
  MOD_RES (6), (7): Xaa is C or S
GIPEPXXVPEKMNAISILYFDENKNVV

SEQ ID NO: 12852 - protein, 22 aa, Artificial Sequence
  Cyclic GFR-binding peptide
  MOD_RES (6), (7): Xaa is C or S
GSAGPXXTPTKMSATSMLYYND

SEQ ID NO: 12853 - protein, 27 aa, Artificial Sequence
  Cyclic GFR-binding peptide
  MOD_RES (6), (7): Xaa is C or S
AAPASXXVPARLSATSILYYDAANNVV

SEQ ID NO: 12854 - protein, 13 aa, Artificial Sequence
  Cyclic GFR-binding peptide
VPEKMSPINILYF

SEQ ID NO: 12855 - protein, 26 aa, Artificial Sequence
  Cyclic GFR-binding peptide
  MOD_RES (6), (7): Xaa is C or S
KASKAXXVPTKLSATSILYYDKGVVT

SEQ ID NO: 12856 - protein, 15 aa, Artificial Sequence
  Cyclic GFR-binding peptide
EPISMLYLDNGRVLL

SEQ ID NO: 12857 - protein, 24 aa, Artificial Sequence
  Cyclic GFR-binding peptide
  MOD_RES (6), (7): Xaa is C or S
ASAAPXXVPQALSPINILYFVGRK

SEQ ID NO: 12858 - protein, 14 aa, Artificial Sequence
  Cyclic GFR-binding peptide
  MOD_RES (1), (1): Xaa is C or S
XVPEKMEPISILYL

SEQ ID NO: 12859 - protein, 21 aa, Artificial Sequence
  Cyclic GFR-binding peptide
  MOD_RES (6), (7): Xaa is C or S
GSAGPXXTPTKMSPISMLYKN

SEQ ID NO: 12860 - protein, 17 aa, Artificial Sequence
  Cyclic GFR-binding peptide
DLSPINILYFVGRTPKV

SEQ ID NO: 12861 - protein, 19 aa, Artificial Sequence
  Cyclic GFR-binding peptide
PTKMSATSMLYYNDKQQII

SEQ ID NO: 12862 - protein, 25 aa, Artificial Sequence
  Cyclic GFR-binding peptide
  MOD_RES (6), (7): Xaa is C or S
ASASPXXVPQDLSPINILYFVGRTP

SEQ ID NO: 12863 - protein, 18 aa, Artificial Sequence
  Cyclic GFR-binding peptide
EKMSATSILYYDENKNVV

SEQ ID NO: 12864 - protein, 27 aa, Artificial Sequence
  Cyclic GFR-binding peptide
  MOD_RES (6), (7): Xaa is C or S
GIPEPXXVPEKMSPINILYFDENKNVV

SEQ ID NO: 12865 - protein, 25 aa, Artificial Sequence
  Cyclic GFR-binding peptide
  MOD_RES (6), (7): Xaa is C or S
KASKAXXVPTKLSATSILYYDKGVV

SEQ ID NO: 12866 - protein, 15 aa, Artificial Sequence
  Cyclic GFR-binding peptide
  MOD_RES (1), (2): Xaa is C or S
XXVPEKMSATSILYY

SEQ ID NO: 12867 - protein, 19 aa, Artificial Sequence
  Cyclic GFR-binding peptide
PQDLSPINILYFVGRTPKV

SEQ ID NO: 12868 - protein, 23 aa, Artificial Sequence
  Cyclic GFR-binding peptide
  MOD_RES (6), (7): Xaa is C or S
GIPEPXXVPEKMNAISILYFDEN

SEQ ID NO: 12869 - protein, 19 aa, Artificial Sequence
  Cyclic GFR-binding peptide
  MOD_RES (5), (6): Xaa is C or S
TPPTXXVPTRLEPISILYL

SEQ ID NO: 12870 - protein, 18 aa, Artificial Sequence
  Cyclic GFR-binding peptide
  MOD_RES (4), (5): Xaa is C or S
AGPXXTPTKMSPISMLYK

SEQ ID NO: 12871 - protein, 14 aa, Artificial Sequence
  Cyclic GFR-binding peptide
  MOD_RES (1), (1): Xaa is C or S
XAPVKTEPISMLYL

SEQ ID NO: 12872 - protein, 18 aa, Artificial Sequence
  Cyclic GFR-binding peptide
  MOD_RES (4), (5): Xaa is C or S
PPTXXVPTRLEPISILYL

SEQ ID NO: 12873 - protein, 21 aa, Artificial Sequence
  Cyclic GFR-binding peptide
  MOD_RES (6), (7): Xaa is C or S
GIPEPXXVPEKMSPINILYFD

SEQ ID NO: 12874 - protein, 15 aa, Artificial Sequence
  Cyclic GFR-binding peptide
  MOD_RES (1), (2): Xaa is C or S
XXAPVKTEPISMLYL

SEQ ID NO: 12875 - protein, 16 aa, Artificial Sequence
  Cyclic GFR-binding peptide
  MOD_RES (2), (3): Xaa is C or S
PXXVPEKMSATSILYY

SEQ ID NO: 12876 - protein, 19 aa, Artificial Sequence
  Cyclic GFR-binding peptide
PTRLSATSILYYDSANNVV

SEQ ID NO: 12877 - protein, 27 aa, Artificial Sequence
  Cyclic GFR-binding peptide
  MOD_RES (6), (7): Xaa is C or S
STPPTXXVPTRLSATSILYYDSANNVV

SEQ ID NO: 12878 - protein, 15 aa, Artificial Sequence
  Cyclic GFR-binding peptide
SATSILYYDKGVVTY

SEQ ID NO: 12879 - protein, 26 aa, Artificial Sequence
  Cyclic GFR-binding peptide
  MOD_RES (6), (7): Xaa is C or S
STPPTXXVPTRLSPISILYKDSANNV

SEQ ID NO: 12880 - protein, 17 aa, Artificial Sequence
  Cyclic GFR-binding peptide
KMEPISILYLDENKNVV

SEQ ID NO: 12881 - protein, 21 aa, Artificial Sequence
  Cyclic GFR-binding peptide
  MOD_RES (6), (7): Xaa is C or S
GIPEPXXVPEKMSATSILYYD

SEQ ID NO: 12882 - protein, 13 aa, Artificial Sequence
  Cyclic GFR-binding peptide
VPTRLEPISILYL

SEQ ID NO: 12883 - protein, 23 aa, Artificial Sequence
  Cyclic GFR-binding peptide
  MOD_RES (6), (7): Xaa is C or S
GIPEPXXVPEKMSPINILYFDEN

SEQ ID NO: 12884 - protein, 16 aa, Artificial Sequence
  Cyclic GFR-binding peptide
LSATSILYYDAANNVV

SEQ ID NO: 12885 - protein, 26 aa, Artificial Sequence
  Cyclic GFR-binding peptide
  MOD_RES (6), (7): Xaa is C or S
RVPSTXXAPVKTSPISMLYKDNGRVL

SEQ ID NO: 12886 - protein, 18 aa, Artificial Sequence
  Cyclic GFR-binding peptide
  MOD_RES (4), (5): Xaa is C or S
PEPXXVPEKMSATSILYY

SEQ ID NO: 12887 - protein, 17 aa, Artificial Sequence
  Cyclic GFR-binding peptide
  MOD_RES (3), (4): Xaa is C or S
STXXAPVKTEPISMLYL

SEQ ID NO: 12888 - protein, 21 aa, Artificial Sequence
  Cyclic GFR-binding peptide
  MOD_RES (6), (7): Xaa is C or S
STPPTXXVPTRLSPISILYKD

SEQ ID NO: 12889 - protein, 15 aa, Artificial Sequence
  Cyclic GFR-binding peptide
  MOD_RES (1), (2): Xaa is C or S
XXAPVKTSPISMLYK

SEQ ID NO: 12890 - protein, 22 aa, Artificial Sequence
  Cyclic GFR-binding peptide
  MOD_RES (6), (7): Xaa is C or S
HVPKPXXAPTKLSATSVLYYDD

SEQ ID NO: 12891 - protein, 14 aa, Artificial Sequence
  Cyclic GFR-binding peptide
  MOD_RES (1), (1): Xaa is C or S
XVPTRLEPISILYL

SEQ ID NO: 12892 - protein, 15 aa, Artificial Sequence
  Cyclic GFR-binding peptide
  MOD_RES (1), (2): Xaa is C or S
XXVPEKMNAISILYF

SEQ ID NO: 12893 - protein, 14 aa, Artificial Sequence
  Cyclic GFR-binding peptide
  MOD_RES (1), (1): Xaa is C or S
XAPVKTSPISMLYK

SEQ ID NO: 12894 - protein, 20 aa, Artificial Sequence
  Cyclic GFR-binding peptide
  MOD_RES (6), (7): Xaa is C or S
ASASPXXVSQDLSPINILYF

SEQ ID NO: 12895 - protein, 26 aa, Artificial Sequence
  Cyclic GFR-binding peptide
  MOD_RES (6), (7): Xaa is C or S
GIPEPXXVPEKMNAISILYFDENKNV

SEQ ID NO: 12896 - protein, 16 aa, Artificial Sequence
  Cyclic GFR-binding peptide
  MOD_RES (2), (3): Xaa is C or S
PXXVPQDLSPINILYF

SEQ ID NO: 12897 - protein, 19 aa, Artificial Sequence
  Cyclic GFR-binding peptide
  MOD_RES (5), (6): Xaa is C or S
APASXXVPARLSATSILYY

SEQ ID NO: 12898 - protein, 18 aa, Artificial Sequence
  Cyclic GFR-binding peptide
  MOD_RES (4), (5): Xaa is C or S
AGPXXTPTKMEPISMLYL

SEQ ID NO: 12899 - protein, 13 aa, Artificial Sequence
  Cyclic GFR-binding peptide
VPEKMSPISILYK

SEQ ID NO: 12900 - protein, 16 aa, Artificial Sequence
  Cyclic GFR-binding peptide
MSATSMLYYNDKQQII

SEQ ID NO: 12901 - protein, 15 aa, Artificial Sequence
  Cyclic GFR-binding peptide
  MOD_RES (1), (2): Xaa is C or S
XXVPEKMSPISILYK

SEQ ID NO: 12902 - protein, 15 aa, Artificial Sequence
  Cyclic GFR-binding peptide
NAISILYFDENKNVV

SEQ ID NO: 12903 - protein, 19 aa, Artificial Sequence
  Cyclic GFR-binding peptide
PEKMEPISILYLDENKNVV

SEQ ID NO: 12904 - protein, 23 aa, Artificial Sequence
  Cyclic GFR-binding peptide
  MOD_RES (6), (7): Xaa is C or S
GSAGPXXTPTKMEPISMLYLNDK

SEQ ID NO: 12905 - protein, 20 aa, Artificial Sequence
  Cyclic GFR-binding peptide
  MOD_RES (6), (7): Xaa is C or S
GIPEPXXVPEKMSPINILYF

SEQ ID NO: 12906 - protein, 19 aa, Artificial Sequence
  Cyclic GFR-binding peptide
  MOD_RES (5), (6): Xaa is C or S
VPSTXXAPVKTEPISMLYL

SEQ ID NO: 12907 - protein, 20 aa, Artificial Sequence
  Cyclic GFR-binding peptide
  MOD_RES (6), (7): Xaa is C or S
RVPSTXXAPVKTSPISMLYK

SEQ ID NO: 12908 - protein, 24 aa, Artificial Sequence
  Cyclic GFR-binding peptide
  MOD_RES (6), (7): Xaa is C or S
GIPEPXXVPEKMEPISILYLDENK

SEQ ID NO: 12909 - protein, 26 aa, Artificial Sequence
  Cyclic GFR-binding peptide
  MOD_RES (6), (7): Xaa is C or S
GIPEPXXVPEKMSPISILYKDENKNV

SEQ ID NO: 12910 - protein, 14 aa, Artificial Sequence
  Cyclic GFR-binding peptide
  MOD_RES (1), (1): Xaa is C or S
XVPEKMSPISILYK

SEQ ID NO: 12911 - protein, 25 aa, Artificial Sequence
  Cyclic GFR-binding peptide
  MOD_RES (6), (7): Xaa is C or S
HVPKPXXAPTKLEPISVLYLDDSSN

SEQ ID NO: 12912 - protein, 18 aa, Artificial Sequence
  Cyclic GFR-binding peptide
EKMEPISILYLDENKNVV

SEQ ID NO: 12913 - protein, 18 aa, Artificial Sequence
  Cyclic GFR-binding peptide
  MOD_RES (4), (5): Xaa is C or S
PEPXXVPEKMNAISILYF

SEQ ID NO: 12914 - protein, 15 aa, Artificial Sequence
  Cyclic GFR-binding peptide
  MOD_RES (1), (2): Xaa is C or S
XXVPTRLSPISILYK

SEQ ID NO: 12915 - protein, 22 aa, Artificial Sequence
  Cyclic GFR-binding peptide
  MOD_RES (6), (7): Xaa is C or S
RVPSTXXAPVKTSATSMLYYDN

SEQ ID NO: 12916 - protein, 21 aa, Artificial Sequence
  Cyclic GFR-binding peptide
  MOD_RES (6), (7): Xaa is C or S
KASKAXXVPTKLSATSILYYD

SEQ ID NO: 12917 - protein, 25 aa, Artificial Sequence
  Cyclic GFR-binding peptide
  MOD_RES (6), (7): Xaa is C or S
GSAGPXXTPTKMEPISMLYLNDKQQ

SEQ ID NO: 12918 - protein, 20 aa, Artificial Sequence
  Cyclic GFR-binding peptide
  MOD_RES (6), (7): Xaa is C or S
GSAGPXXTPTKMSATSMLYY

SEQ ID NO: 12919 - protein, 26 aa, Artificial Sequence
  Cyclic GFR-binding peptide
  MOD_RES (6), (7): Xaa is C or S
GIPEPXXVPEKMEPISILYLDENKNV

SEQ ID NO: 12920 - protein, 16 aa, Artificial Sequence
  Cyclic GFR-binding peptide
  MOD_RES (2), (3): Xaa is C or S
PXXVPEKMSPINILYF

SEQ ID NO: 12921 - protein, 27 aa, Artificial Sequence
  Cyclic GFR-binding peptide
  MOD_RES (6), (7): Xaa is C or S
ASASPXXVSQDLSPINILYFIGKTPKI

SEQ ID NO: 12922 - protein, 15 aa, Artificial Sequence
  Cyclic GFR-binding peptide
SPINILYFDENKNVV

SEQ ID NO: 12923 - protein, 23 aa, Artificial Sequence
  Cyclic GFR-binding peptide
  MOD_RES (6), (7): Xaa is C or S
RVPSTXXAPVKTEPISMLYLDNG

SEQ ID NO: 12924 - protein, 26 aa, Artificial Sequence
  Cyclic GFR-binding peptide
  MOD_RES (6), (7): Xaa is C or S
HVPKPXXAPTKLSATSVLYYDDSSNV

SEQ ID NO: 12925 - protein, 25 aa, Artificial Sequence
  Cyclic GFR-binding peptide
  MOD_RES (6), (7): Xaa is C or S
AAPASXXVPARLSATSILYYDAANN

SEQ ID NO: 12926 - protein, 25 aa, Artificial Sequence
  Cyclic GFR-binding peptide
  MOD_RES (6), (7): Xaa is C or S
GSAGPXXTPTKMSPISMLYKNDKQQ

SEQ ID NO: 12927 - protein, 13 aa, Artificial Sequence
  Cyclic GFR-binding peptide
APVKTSPISMLYK

SEQ ID NO: 12928 - protein, 20 aa, Artificial Sequence
  Cyclic GFR-binding peptide
  MOD_RES (6), (7): Xaa is C or S
ASAAPXXVPQALSPINILYF

SEQ ID NO: 12929 - protein, 22 aa, Artificial Sequence
  Cyclic GFR-binding peptide
  MOD_RES (6), (7): Xaa is C or S
AAPASXXVPARLSATSILYYDA

SEQ ID NO: 12930 - protein, 19 aa, Artificial Sequence
  Cyclic GFR-binding peptide
  MOD_RES (5), (6): Xaa is C or S
SAGPXXTPTKMSPISMLYK

SEQ ID NO: 12931 - protein, 16 aa, Artificial Sequence
  Cyclic GFR-binding peptide
  MOD_RES (2), (3): Xaa is C or S
PXXVPEKMEPISILYL

SEQ ID NO: 12932 - protein, 26 aa, Artificial Sequence
  Cyclic GFR-binding peptide
  MOD_RES (6), (7): Xaa is C or S
GSAGPXXTPTKMSATSMLYYNDKQQI

SEQ ID NO: 12933 - protein, 19 aa, Artificial Sequence
  Cyclic GFR-binding peptide
  MOD_RES (5), (6): Xaa is C or S
IPEPXXVPEKMSPINILYF

SEQ ID NO: 12934 - protein, 24 aa, Artificial Sequence
  Cyclic GFR-binding peptide
  MOD_RES (6), (7): Xaa is C or S
STPPTXXVPTRLSATSILYYDSAN

SEQ ID NO: 12935 - protein, 20 aa, Artificial Sequence
  Cyclic GFR-binding peptide
  MOD_RES (6), (7): Xaa is C or S
GSAGPXXTPTKMEPISMLYL

SEQ ID NO: 12936 - protein, 25 aa, Artificial Sequence
  Cyclic GFR-binding peptide
  MOD_RES (6), (7): Xaa is C or S
RVPSTXXAPVKTSATSMLYYDNGRV

SEQ ID NO: 12937 - protein, 18 aa, Artificial Sequence
  Cyclic GFR-binding peptide
VKTEPISMLYLDNGRVLL

SEQ ID NO: 12938 - protein, 18 aa, Artificial Sequence
  Cyclic GFR-binding peptide
  MOD_RES (4), (5): Xaa is C or S
ASPXXVPQDLSPINILYF

SEQ ID NO: 12939 - protein, 26 aa, Artificial Sequence
  Cyclic GFR-binding peptide
  MOD_RES (6), (7): Xaa is C or S
ASASPXXVSQDLSPINILYFIGKTPK

SEQ ID NO: 12940 - protein, 18 aa, Artificial Sequence
  Cyclic GFR-binding peptide
  MOD_RES (4), (5): Xaa is C or S
PSTXXAPVKTSATSMLYY

SEQ ID NO: 12941 - protein, 13 aa, Artificial Sequence
  Cyclic GFR-binding peptide
VPEKMEPISILYL

SEQ ID NO: 12942 - protein, 18 aa, Artificial Sequence
  Cyclic GFR-binding peptide
ARLSATSILYYDAANNVV

SEQ ID NO: 12943 - protein, 25 aa, Artificial Sequence
  Cyclic GFR-binding peptide
  MOD_RES (6), (7): Xaa is C or S
RVPSTXXAPVKTSPISMLYKDNGRV

SEQ ID NO: 12944 - protein, 20 aa, Artificial Sequence
  Cyclic GFR-binding peptide
  MOD_RES (6), (7): Xaa is C or S
HVPKPXXAPTKLSATSVLYY

SEQ ID NO: 12945 - protein, 16 aa, Artificial Sequence
  Cyclic GFR-binding peptide
LSATSILYYDKGVVTY

SEQ ID NO: 12946 - protein, 24 aa, Artificial Sequence
  Cyclic GFR-binding peptide
  MOD_RES (6), (7): Xaa is C or S
RVPSTXXAPVKTSPISMLYKDNGR

SEQ ID NO: 12947 - protein, 16 aa, Artificial Sequence
  Cyclic GFR-binding peptide
  MOD_RES (2), (3): Xaa is C or S
AXXVPTKLSATSILYY

SEQ ID NO: 12948 - protein, 19 aa, Artificial Sequence
  Cyclic GFR-binding peptide
  MOD_RES (5), (6): Xaa is C or S
SAGPXXTPTKMSATSMLYY

SEQ ID NO: 12949 - protein, 26 aa, Artificial Sequence
  Cyclic GFR-binding peptide
  MOD_RES (6), (7): Xaa is C or S
ASASPXXVPQDLSPINILYFVGRTPK

SEQ ID NO: 12950 - protein, 17 aa, Artificial Sequence
  Cyclic GFR-binding peptide
RLSATSILYYDAANNVV

SEQ ID NO: 12951 - protein, 19 aa, Artificial Sequence
  Cyclic GFR-binding peptide
PTKMSPISMLYKNDKQQII

SEQ ID NO: 12952 - protein, 15 aa, Artificial Sequence
  Cyclic GFR-binding peptide
  MOD_RES (1), (2): Xaa is C or S
XXVSQDLSPINILYF

SEQ ID NO: 12953 - protein, 24 aa, Artificial Sequence
  Cyclic GFR-binding peptide
  MOD_RES (6), (7): Xaa is C or S
RVPSTXXAPVKTEPISMLYLDNGR

SEQ ID NO: 12954 - protein, 19 aa, Artificial Sequence
  Cyclic GFR-binding peptide
PTRLSPISILYKDSANNVV

SEQ ID NO: 12955 - protein, 16 aa, Artificial Sequence
  Cyclic GFR-binding peptide
  MOD_RES (2), (3): Xaa is C or S
PXXVPQALSPINILYF

SEQ ID NO: 12956 - protein, 25 aa, Artificial Sequence
  Cyclic GFR-binding peptide
  MOD_RES (6), (7): Xaa is C or S
GSAGPXXTPTKMSATSMLYYNDKQQ

SEQ ID NO: 12957 - protein, 18 aa, Artificial Sequence
  Cyclic GFR-binding peptide
TKLSATSILYYDKGVVTY

SEQ ID NO: 12958 - protein, 18 aa, Artificial Sequence
  Cyclic GFR-binding peptide
  MOD_RES (4), (5): Xaa is C or S
PSTXXAPVKTSPISMLYK

SEQ ID NO: 12959 - protein, 19 aa, Artificial Sequence
  Cyclic GFR-binding peptide
PEKMNAISILYFDENKNVV

SEQ ID NO: 12960 - protein, 20 aa, Artificial Sequence
  Cyclic GFR-binding peptide
  MOD_RES (6), (7): Xaa is C or S
RVPSTXXAPVKTEPISMLYL

SEQ ID NO: 12961 - protein, 22 aa, Artificial Sequence
  Cyclic GFR-binding peptide
  MOD_RES (6), (7): Xaa is C or S
STPPTXXVPTRLSATSILYYDS

SEQ ID NO: 12962 - protein, 16 aa, Artificial Sequence
  Cyclic GFR-binding peptide
LSPINILYFIGKTPKI

SEQ ID NO: 12963 - protein, 16 aa, Artificial Sequence
  Cyclic GFR-binding peptide
  MOD_RES (2), (3): Xaa is C or S
TXXAPVKTSATSMLYY

SEQ ID NO: 12964 - protein, 25 aa, Artificial Sequence
  Cyclic GFR-binding peptide
  MOD_RES (6), (7): Xaa is C or S
STPPTXXVPTRLSPISILYKDSANN

SEQ ID NO: 12965 - protein, 15 aa, Artificial Sequence
  Cyclic GFR-binding peptide
SATSILYYDSANNVV

SEQ ID NO: 12966 - protein, 16 aa, Artificial Sequence
  Cyclic GFR-binding peptide
MSPISMLYKNDKQQII

SEQ ID NO: 12967 - protein, 21 aa, Artificial Sequence
  Cyclic GFR-binding peptide
  MOD_RES (6), (7): Xaa is C or S
AAPASXXVPARLSATSILYYD

SEQ ID NO: 12968 - protein, 17 aa, Artificial Sequence
  Cyclic GFR-binding peptide
  MOD_RES (3), (4): Xaa is C or S
STXXAPVKTSATSMLYY

SEQ ID NO: 12969 - protein, 17 aa, Artificial Sequence
  Cyclic GFR-binding peptide
KMSPINILYFDENKNVV

SEQ ID NO: 12970 - protein, 13 aa, Artificial Sequence
  Cyclic GFR-binding peptide
VPEKMSATSILYY

SEQ ID NO: 12971 - protein, 19 aa, Artificial Sequence
  Cyclic GFR-binding peptide
  MOD_RES (5), (6): Xaa is C or S
SAGPXXTPTKMEPISMLYL

SEQ ID NO: 12972 - protein, 21 aa, Artificial Sequence
  Cyclic GFR-binding peptide
  MOD_RES (6), (7): Xaa is C or S
GIPEPXXVPEKMSPISILYKD

SEQ ID NO: 12973 - protein, 27 aa, Artificial Sequence
  Cyclic GFR-binding peptide
  MOD_RES (6), (7): Xaa is C or S
GIPEPXXVPEKMEPISILYLDENKNVV

SEQ ID NO: 12974 - protein, 13 aa, Artificial Sequence
  Cyclic GFR-binding peptide
APVKTEPISMLYL

SEQ ID NO: 12975 - protein, 27 aa, Artificial Sequence
  Cyclic GFR-binding peptide
  MOD_RES (6), (7): Xaa is C or S
GSAGPXXTPTKMEPISMLYLNDKQQII

SEQ ID NO: 12976 - protein, 16 aa, Artificial Sequence
  Cyclic GFR-binding peptide
  MOD_RES (2), (3): Xaa is C or S
TXXAPVKTSPISMLYK

SEQ ID NO: 12977 - protein, 25 aa, Artificial Sequence
  Cyclic GFR-binding peptide
  MOD_RES (6), (7): Xaa is C or S
STPPTXXVPTRLSATSILYYDSANN

SEQ ID NO: 12978 - protein, 16 aa, Artificial Sequence
  Cyclic GFR-binding peptide
LSPINILYFVGRKPKV

SEQ ID NO: 12979 - protein, 13 aa, Artificial Sequence
  Cyclic GFR-binding peptide
VPTKLSATSILYY

SEQ ID NO: 12980 - protein, 17 aa, Artificial Sequence
  Cyclic GFR-binding peptide
  MOD_RES (3), (4): Xaa is C or S
STXXAPVKTSPISMLYK

SEQ ID NO: 12981 - protein, 15 aa, Artificial Sequence
  Cyclic GFR-binding peptide
  MOD_RES (1), (2): Xaa is C or S
XXVPTRLEPISILYL

SEQ ID NO: 12982 - protein, 17 aa, Artificial Sequence
  Cyclic GFR-binding peptide
KMNAISILYFDENKNVV

SEQ ID NO: 12983 - protein, 18 aa, Artificial Sequence
  Cyclic GFR-binding peptide
EKMSPINILYFDENKNVV

SEQ ID NO: 12984 - protein, 19 aa, Artificial Sequence
  Cyclic GFR-binding peptide
PTKLSATSILYYDKGVVTY

SEQ ID NO: 12985 - protein, 20 aa, Artificial Sequence
  Cyclic GFR-binding peptide
  MOD_RES (6), (7): Xaa is C or S
GSAGPXXTPTKMSPISMLYK

SEQ ID NO: 12986 - protein, 23 aa, Artificial Sequence
  Cyclic GFR-binding peptide
  MOD_RES (6), (7): Xaa is C or S
STPPTXXVPTRLSATSILYYDSA

SEQ ID NO: 12987 - protein, 26 aa, Artificial Sequence
  Cyclic GFR-binding peptide
  MOD_RES (6), (7): Xaa is C or S
STPPTXXVPTRLSATSILYYDSANNV

SEQ ID NO: 12988 - protein, 27 aa, Artificial Sequence
  Cyclic GFR-binding peptide
  MOD_RES (6), (7): Xaa is C or S
ASASPXXVPQDLSPINILYFVGRTPKV

SEQ ID NO: 12989 - protein, 26 aa, Artificial Sequence
  Cyclic GFR-binding peptide
  MOD_RES (6), (7): Xaa is C or S
GSAGPXXTPTKMEPISMLYLNDKQQI

SEQ ID NO: 12990 - protein, 18 aa, Artificial Sequence
  Cyclic GFR-binding peptide
TRLSATSILYYDSANNVV

SEQ ID NO: 12991 - protein, 16 aa, Artificial Sequence
  Cyclic GFR-binding peptide
MSPINILYFDENKNVV

SEQ ID NO: 12992 - protein, 22 aa, Artificial Sequence
  Cyclic GFR-binding peptide
  MOD_RES (6), (7): Xaa is C or S
STPPTXXVPTRLSPISILYKDS

SEQ ID NO: 12993 - protein, 15 aa, Artificial Sequence
  Cyclic GFR-binding peptide
  MOD_RES (1), (2): Xaa is C or S
XXVPARLSATSILYY

SEQ ID NO: 12994 - protein, 18 aa, Artificial Sequence
  Cyclic GFR-binding peptide
VKTSATSMLYYDNGRVLL

SEQ ID NO: 12995 - protein, 22 aa, Artificial Sequence
  Cyclic GFR-binding peptide
  MOD_RES (6), (7): Xaa is C or S
STPPTXXVPTRLEPISILYLDS

SEQ ID NO: 12996 - protein, 22 aa, Artificial Sequence
  Cyclic GFR-binding peptide
  MOD_RES (6), (7): Xaa is C or S
GSAGPXXTPTKMSPISMLYKND

SEQ ID NO: 12997 - protein, 14 aa, Artificial Sequence
  Cyclic GFR-binding peptide
  MOD_RES (1), (1): Xaa is C or S
XVPARLSATSILYY

SEQ ID NO: 12998 - protein, 16 aa, Artificial Sequence
  Cyclic GFR-binding peptide
LSPINILYFVGRTPKV

SEQ ID NO: 12999 - protein, 23 aa, Artificial Sequence
  Cyclic GFR-binding peptide
  MOD_RES (6), (7): Xaa is C or S
ASASPXXVSQDLSPINILYFIGK

SEQ ID NO: 13000 - protein, 20 aa, Artificial Sequence
  Cyclic GFR-binding peptide
  MOD_RES (6), (7): Xaa is C or S
HVPKPXXAPTKLSPISVLYK

SEQ ID NO: 13001 - protein, 25 aa, Artificial Sequence
  Cyclic GFR-binding peptide
  MOD_RES (6), (7): Xaa is C or S
HVPKPXXAPTKLSATSVLYYDDSSN

SEQ ID NO: 13002 - protein, 23 aa, Artificial Sequence
  Cyclic GFR-binding peptide
  MOD_RES (6), (7): Xaa is C or S
AAPASXXVPARLSATSILYYDAA

SEQ ID NO: 13003 - protein, 22 aa, Artificial Sequence
  Cyclic GFR-binding peptide
  MOD_RES (6), (7): Xaa is C or S
GSAGPXXTPTKMEPISMLYLND

SEQ ID NO: 13004 - protein, 15 aa, Artificial Sequence
  Cyclic GFR-binding peptide
SATSMLYYDNGRVLL

SEQ ID NO: 13005 - protein, 18 aa, Artificial Sequence
  Cyclic GFR-binding peptide
TKMSATSMLYYNDKQQII

SEQ ID NO: 13006 - protein, 14 aa, Artificial Sequence
  Cyclic GFR-binding peptide
  MOD_RES (1), (1): Xaa is C or S
XVPQALSPINILYF

SEQ ID NO: 13007 - protein, 17 aa, Artificial Sequence
  Cyclic GFR-binding peptide
  MOD_RES (3), (4): Xaa is C or S
PTXXVPTRLSATSILYY

SEQ ID NO: 13008 - protein, 27 aa, Artificial Sequence
  Cyclic GFR-binding peptide
  MOD_RES (6), (7): Xaa is C or S
RVPSTXXAPVKTEPISMLYLDNGRVLL

SEQ ID NO: 13009 - protein, 22 aa, Artificial Sequence
  Cyclic GFR-binding peptide
  MOD_RES (6), (7): Xaa is C or S
GIPEPXXVPEKMSPINILYFDE

SEQ ID NO: 13010 - protein, 18 aa, Artificial Sequence
  Cyclic GFR-binding peptide
  MOD_RES (4), (5): Xaa is C or S
ASPXXVSQDLSPINILYF

SEQ ID NO: 13011 - protein, 18 aa, Artificial Sequence
  Cyclic GFR-binding peptide
  MOD_RES (4), (5): Xaa is C or S
PPTXXVPTRLSPISILYK

SEQ ID NO: 13012 - protein, 16 aa, Artificial Sequence
  Cyclic GFR-binding peptide
TSPISMLYKDNGRVLL

SEQ ID NO: 13013 - protein, 25 aa, Artificial Sequence
  Cyclic GFR-binding peptide
  MOD_RES (6), (7): Xaa is C or S
ASAAPXXVPQALSPINILYFVGRKP

SEQ ID NO: 13014 - protein, 27 aa, Artificial Sequence
  Cyclic GFR-binding peptide
  MOD_RES (6), (7): Xaa is C or S
GSAGPXXTPTKMSATSMLYYNDKQQII

SEQ ID NO: 13015 - protein, 16 aa, Artificial Sequence
  Cyclic GFR-binding peptide
  MOD_RES (2), (3): Xaa is C or S
PXXVPEKMNAISILYF

SEQ ID NO: 13016 - protein, 27 aa, Artificial Sequence
  Cyclic GFR-binding peptide
  MOD_RES (6), (7): Xaa is C or S
HVPKPXXAPTKLEPISVLYLDDSSNVI

SEQ ID NO: 13017 - protein, 20 aa, Artificial Sequence
  Cyclic GFR-binding peptide
  MOD_RES (6), (7): Xaa is C or S
STPPTXXVPTRLSPISILYK

SEQ ID NO: 13018 - protein, 22 aa, Artificial Sequence
  Cyclic GFR-binding peptide
  MOD_RES (6), (7): Xaa is C or S
GIPEPXXVPEKMSPISILYKDE

SEQ ID NO: 13019 - protein, 15 aa, Artificial Sequence
  Cyclic GFR-binding peptide
SPINILYFVGRKPKV

SEQ ID NO: 13020 - protein, 14 aa, Artificial Sequence
  Cyclic GFR-binding peptide
  MOD_RES (1), (1): Xaa is C or S
XVSQDLSPINILYF

SEQ ID NO: 13021 - protein, 27 aa, Artificial Sequence
  Cyclic GFR-binding peptide
  MOD_RES (6), (7): Xaa is C or S
GIPEPXXVPEKMSATSILYYDENKNVV

SEQ ID NO: 13022 - protein, 23 aa, Artificial Sequence
  Cyclic GFR-binding peptide
  MOD_RES (6), (7): Xaa is C or S
STPPTXXVPTRLEPISILYLDSA

SEQ ID NO: 13023 - protein, 21 aa, Artificial Sequence
  Cyclic GFR-binding peptide
  MOD_RES (6), (7): Xaa is C or S
RVPSTXXAPVKTEPISMLYLD

SEQ ID NO: 13024 - protein, 17 aa, Artificial Sequence
  Cyclic GFR-binding peptide
KMSATSILYYDENKNVV

SEQ ID NO: 13025 - protein, 16 aa, Artificial Sequence
  Cyclic GFR-binding peptide
TEPISMLYLDNGRVLL

SEQ ID NO: 13026 - protein, 22 aa, Artificial Sequence
  Cyclic GFR-binding peptide
  MOD_RES (6), (7): Xaa is C or S
GIPEPXXVPEKMEPISILYLDE

SEQ ID NO: 13027 - protein, 17 aa, Artificial Sequence
  Cyclic GFR-binding peptide
  MOD_RES (3), (4): Xaa is C or S
ASXXVPARLSATSILYY

SEQ ID NO: 13028 - protein, 22 aa, Artificial Sequence
  Cyclic GFR-binding peptide
  MOD_RES (6), (7): Xaa is C or S
ASAAPXXVPQALSPINILYFVG

SEQ ID NO: 13029 - protein, 21 aa, Artificial Sequence
  Cyclic GFR-binding peptide
  MOD_RES (6), (7): Xaa is C or S
STPPTXXVPTRLSATSILYYD

SEQ ID NO: 13030 - protein, 27 aa, Artificial Sequence
  Cyclic GFR-binding peptide
  MOD_RES (6), (7): Xaa is C or S
STPPTXXVPTRLEPISILYLDSANNVV

SEQ ID NO: 13031 - protein, 19 aa, Artificial Sequence
  Cyclic GFR-binding peptide
  MOD_RES (5), (6): Xaa is C or S
SASPXXVSQDLSPINILYF

SEQ ID NO: 13032 - protein, 21 aa, Artificial Sequence
  Cyclic GFR-binding peptide
  MOD_RES (6), (7): Xaa is C or S
STPPTXXVPTRLEPISILYLD

SEQ ID NO: 13033 - protein, 26 aa, Artificial Sequence
  Cyclic GFR-binding peptide
  MOD_RES (6), (7): Xaa is C or S
STPPTXXVPTRLEPISILYLDSANNV

SEQ ID NO: 13034 - protein, 18 aa, Artificial Sequence
  Cyclic GFR-binding peptide
EKMNAISILYFDENKNVV

SEQ ID NO: 13035 - protein, 20 aa, Artificial Sequence
  Cyclic GFR-binding peptide
  MOD_RES (6), (7): Xaa is C or S
GIPEPXXVPEKMNAISILYF

SEQ ID NO: 13036 - protein, 17 aa, Artificial Sequence
  Cyclic GFR-binding peptide
  MOD_RES (3), (4): Xaa is C or S
EPXXVPEKMSPISILYK

SEQ ID NO: 13037 - protein, 19 aa, Artificial Sequence
  Cyclic GFR-binding peptide
PEKMSATSILYYDENKNVV

SEQ ID NO: 13038 - protein, 13 aa, Artificial Sequence
  Cyclic GFR-binding peptide
VPQALSPINILYF

SEQ ID NO: 13039 - protein, 16 aa, Artificial Sequence
  Cyclic GFR-binding peptide
LEPISILYLDSANNVV

SEQ ID NO: 13040 - protein, 15 aa, Artificial Sequence
  Cyclic GFR-binding peptide
SPINILYFIGKTPKI

SEQ ID NO: 13041 - protein, 16 aa, Artificial Sequence
  Cyclic GFR-binding peptide
MSPISILYKDENKNVV

SEQ ID NO: 13042 - protein, 21 aa, Artificial Sequence
  Cyclic GFR-binding peptide
  MOD_RES (6), (7): Xaa is C or S
RVPSTXXAPVKTSATSMLYYD

SEQ ID NO: 13043 - protein, 18 aa, Artificial Sequence
  Cyclic GFR-binding peptide
QDLSPINILYFIGKTPKI

SEQ ID NO: 13044 - protein, 26 aa, Artificial Sequence
  Cyclic GFR-binding peptide
  MOD_RES (6), (7): Xaa is C or S
HVPKPXXAPTKLEPISVLYLDDSSNV

SEQ ID NO: 13045 - protein, 26 aa, Artificial Sequence
  Cyclic GFR-binding peptide
  MOD_RES (6), (7): Xaa is C or S
AAPASXXVPARLSATSILYYDAANNV

SEQ ID NO: 13046 - protein, 17 aa, Artificial Sequence
  Cyclic GFR-binding peptide
  MOD_RES (3), (4): Xaa is C or S
PTXXVPTRLEPISILYL

SEQ ID NO: 13047 - protein, 13 aa, Artificial Sequence
  Cyclic GFR-binding peptide
TPTKMSPISMLYK

SEQ ID NO: 13048 - protein, 25 aa, Artificial Sequence
  Cyclic GFR-binding peptide
  MOD_RES (6), (7): Xaa is C or S
ASASPXXVSQDLSPINILYFIGKTP

SEQ ID NO: 13049 - protein, 26 aa, Artificial Sequence
  Cyclic GFR-binding peptide
  MOD_RES (6), (7): Xaa is C or S
GIPEPXXVPEKMSPINILYFDENKNV

SEQ ID NO: 13050 - protein, 13 aa, Artificial Sequence
  Cyclic GFR-binding peptide
VSQDLSPINILYF

SEQ ID NO: 13051 - protein, 19 aa, Artificial Sequence
  Cyclic GFR-binding peptide
PVKTEPISMLYLDNGRVLL

SEQ ID NO: 13052 - protein, 22 aa, Artificial Sequence
  Cyclic GFR-binding peptide
  MOD_RES (6), (7): Xaa is C or S
KASKAXXVPTKLSATSILYYDK

SEQ ID NO: 13053 - protein, 22 aa, Artificial Sequence
  Cyclic GFR-binding peptide
  MOD_RES (6), (7): Xaa is C or S
GIPEPXXVPEKMNAISILYFDE

SEQ ID NO: 13054 - protein, 27 aa, Artificial Sequence
  Cyclic GFR-binding peptide
  MOD_RES (6), (7): Xaa is C or S
RVPSTXXAPVKTSPISMLYKDNGRVLL

SEQ ID NO: 13055 - protein, 26 aa, Artificial Sequence
  Cyclic GFR-binding peptide
  MOD_RES (6), (7): Xaa is C or S
RVPSTXXAPVKTEPISMLYLDNGRVL

SEQ ID NO: 13056 - protein, 19 aa, Artificial Sequence
  Cyclic GFR-binding peptide
  MOD_RES (5), (6): Xaa is C or S
IPEPXXVPEKMNAISILYF

SEQ ID NO: 13057 - protein, 19 aa, Artificial Sequence
  Cyclic GFR-binding peptide
SQDLSPINILYFIGKTPKI

SEQ ID NO: 13058 - protein, 18 aa, Artificial Sequence
  Cyclic GFR-binding peptide
  MOD_RES (4), (5): Xaa is C or S
PEPXXVPEKMSPISILYK

SEQ ID NO: 13059 - protein, 14 aa, Artificial Sequence
  Cyclic GFR-binding peptide
  MOD_RES (1), (1): Xaa is C or S
XVPTKLSATSILYY

SEQ ID NO: 13060 - protein, 25 aa, Artificial Sequence
  Cyclic GFR-binding peptide
  MOD_RES (6), (7): Xaa is C or S
RVPSTXXAPVKTEPISMLYLDNGRV

SEQ ID NO: 13061 - protein, 27 aa, Artificial Sequence
  Cyclic GFR-binding peptide
  MOD_RES (6), (7): Xaa is C or S
HVPKPXXAPTKLSPISVLYKDDSSNVI

SEQ ID NO: 13062 - protein, 17 aa, Artificial Sequence
  Cyclic GFR-binding peptide
  MOD_RES (3), (4): Xaa is C or S
EPXXVPEKMSATSILYY

SEQ ID NO: 13063 - protein, 14 aa, Artificial Sequence
  Cyclic GFR-binding peptide
  MOD_RES (1), (1): Xaa is C or S
XVPEKMNAISILYF

SEQ ID NO: 13064 - protein, 17 aa, Artificial Sequence
  Cyclic GFR-binding peptide
  MOD_RES (3), (4): Xaa is C or S
KAXXVPTKLSATSILYY

SEQ ID NO: 13065 - protein, 13 aa, Artificial Sequence
  Cyclic GFR-binding peptide
VPARLSATSILYY

SEQ ID NO: 13066 - protein, 23 aa, Artificial Sequence
  Cyclic GFR-binding peptide
  MOD_RES (6), (7): Xaa is C or S
ASASPXXVPQDLSPINILYFVGR

SEQ ID NO: 13067 - protein, 19 aa, Artificial Sequence
  Cyclic GFR-binding peptide
  MOD_RES (5), (6): Xaa is C or S
IPEPXXVPEKMEPISILYL

SEQ ID NO: 13068 - protein, 24 aa, Artificial Sequence
  Cyclic GFR-binding peptide
  MOD_RES (6), (7): Xaa is C or S
GIPEPXXVPEKMSPISILYKDENK

SEQ ID NO: 13069 - protein, 16 aa, Artificial Sequence
  Cyclic GFR-binding peptide
  MOD_RES (2), (3): Xaa is C or S
TXXVPTRLSPISILYK

SEQ ID NO: 13070 - protein, 16 aa, Artificial Sequence
  Cyclic GFR-binding peptide
MNAISILYFDENKNVV

SEQ ID NO: 13071 - protein, 23 aa, Artificial Sequence
  Cyclic GFR-binding peptide
  MOD_RES (6), (7): Xaa is C or S
HVPKPXXAPTKLSATSVLYYDDS

SEQ ID NO: 13072 - protein, 24 aa, Artificial Sequence
  Cyclic GFR-binding peptide
  MOD_RES (6), (7): Xaa is C or S
STPPTXXVPTRLSPISILYKDSAN

SEQ ID NO: 13073 - protein, 24 aa, Artificial Sequence
  Cyclic GFR-binding peptide
  MOD_RES (6), (7): Xaa is C or S
ASASPXXVPQDLSPINILYFVGRT

SEQ ID NO: 13074 - protein, 15 aa, Artificial Sequence
  Cyclic GFR-binding peptide
  MOD_RES (1), (2): Xaa is C or S
XXVPTKLSATSILYY

SEQ ID NO: 13075 - protein, 25 aa, Artificial Sequence
  Cyclic GFR-binding peptide
  MOD_RES (6), (7): Xaa is C or S
GIPEPXXVPEKMNAISILYFDENKN

SEQ ID NO: 13076 - protein, 17 aa, Artificial Sequence
  Cyclic GFR-binding peptide
KTSATSMLYYDNGRVLL

SEQ ID NO: 13077 - protein, 16 aa, Artificial Sequence
  Cyclic GFR-binding peptide
  MOD_RES (2), (3): Xaa is C or S
PXXTPTKMEPISMLYL

SEQ ID NO: 13078 - protein, 20 aa, Artificial Sequence
  Cyclic GFR-binding peptide
  MOD_RES (6), (7): Xaa is C or S
KASKAXXVPTKLSATSILYY

SEQ ID NO: 13079 - protein, 24 aa, Artificial Sequence
  Cyclic GFR-binding peptide
  MOD_RES (6), (7): Xaa is C or S
KASKAXXVPTKLSATSILYYDKGV

SEQ ID NO: 13080 - protein, 23 aa, Artificial Sequence
  Cyclic GFR-binding peptide
  MOD_RES (6), (7): Xaa is C or S
HVPKPXXAPTKLSPISVLYKDDS

SEQ ID NO: 13081 - protein, 19 aa, Artificial Sequence
  Cyclic GFR-binding peptide
  MOD_RES (5), (6): Xaa is C or S
IPEPXXVPEKMSATSILYY

SEQ ID NO: 13082 - protein, 18 aa, Artificial Sequence
  Cyclic GFR-binding peptide
  MOD_RES (4), (5): Xaa is C or S
PPTXXVPTRLSATSILYY

SEQ ID NO: 13083 - protein, 22 aa, Artificial Sequence
  Cyclic GFR-binding peptide
  MOD_RES (6), (7): Xaa is C or S
GIPEPXXVPEKMSATSILYYDE

SEQ ID NO: 13084 - protein, 17 aa, Artificial Sequence
  Cyclic GFR-binding peptide
DLSPINILYFIGKTPKI

SEQ ID NO: 13085 - protein, 17 aa, Artificial Sequence
  Cyclic GFR-binding peptide
  MOD_RES (3), (4): Xaa is C or S
EPXXVPEKMEPISILYL

SEQ ID NO: 13086 - protein, 26 aa, Artificial Sequence
  Cyclic GFR-binding peptide
  MOD_RES (6), (7): Xaa is C or S
HVPKPXXAPTKLSPISVLYKDDSSNV

SEQ ID NO: 13087 - protein, 19 aa, Artificial Sequence
  Cyclic GFR-binding peptide
PQALSPINILYFVGRKPKV

SEQ ID NO: 13088 - protein, 26 aa, Artificial Sequence
  Cyclic GFR-binding peptide
  MOD_RES (6), (7): Xaa is C or S
ASAAPXXVPQALSPINILYFVGRKPK

SEQ ID NO: 13089 - protein, 17 aa, Artificial Sequence
  Cyclic GFR-binding peptide
KMSPISMLYKNDKQQII

SEQ ID NO: 13090 - protein, 17 aa, Artificial Sequence
  Cyclic GFR-binding peptide
RLEPISILYLDSANNVV

SEQ ID NO: 13091 - protein, 18 aa, Artificial Sequence
  Cyclic GFR-binding peptide
QDLSPINILYFVGRTPKV

SEQ ID NO: 13092 - protein, 17 aa, Artificial Sequence
  Cyclic GFR-binding peptide
  MOD_RES (3), (4): Xaa is C or S
GPXXTPTKMSPISMLYK

SEQ ID NO: 13093 - protein, 20 aa, Artificial Sequence
  Cyclic GFR-binding peptide
  MOD_RES (6), (7): Xaa is C or S
GIPEPXXVPEKMEPISILYL

SEQ ID NO: 13094 - protein, 19 aa, Artificial Sequence
  Cyclic GFR-binding peptide
  MOD_RES (5), (6): Xaa is C or S
TPPTXXVPTRLSPISILYK

SEQ ID NO: 13095 - protein, 25 aa, Artificial Sequence
  Cyclic GFR-binding peptide
  MOD_RES (6), (7): Xaa is C or S
GIPEPXXVPEKMSPISILYKDENKN

SEQ ID NO: 13096 - protein, 17 aa, Artificial Sequence
  Cyclic GFR-binding peptide
KMEPISMLYLNDKQQII

SEQ ID NO: 13097 - protein, 17 aa, Artificial Sequence
  Cyclic GFR-binding peptide
ALSPINILYFVGRKPKV

SEQ ID NO: 13098 - protein, 17 aa, Artificial Sequence
  Cyclic GFR-binding peptide
RLSPISILYKDSANNVV

SEQ ID NO: 13099 - protein, 24 aa, Artificial Sequence
  Cyclic GFR-binding peptide
  MOD_RES (6), (7): Xaa is C or S
HVPKPXXAPTKLSPISVLYKDDSS

SEQ ID NO: 13100 - protein, 13 aa, Artificial Sequence
  Cyclic GFR-binding peptide
VPEKMNAISILYF

SEQ ID NO: 13101 - protein, 20 aa, Artificial Sequence
  Cyclic GFR-binding peptide
  MOD_RES (6), (7): Xaa is C or S
STPPTXXVPTRLSATSILYY

SEQ ID NO: 13102 - protein, 15 aa, Artificial Sequence
  Cyclic GFR-binding peptide
SATSILYYDENKNVV

SEQ ID NO: 13103 - protein, 23 aa, Artificial Sequence
  Cyclic GFR-binding peptide
  MOD_RES (6), (7): Xaa is C or S
HVPKPXXAPTKLEPISVLYLDDS

SEQ ID NO: 13104 - protein, 23 aa, Artificial Sequence
  Cyclic GFR-binding peptide
  MOD_RES (6), (7): Xaa is C or S
GIPEPXXVPEKMSPISILYKDEN

SEQ ID NO: 13105 - protein, 16 aa, Artificial Sequence
  Cyclic GFR-binding peptide
MEPISMLYLNDKQQII

SEQ ID NO: 13106 - protein, 26 aa, Artificial Sequence
  Cyclic GFR-binding peptide
  MOD_RES (6), (7): Xaa is C or S
RVPSTXXAPVKTSATSMLYYDNGRVL

SEQ ID NO: 13107 - protein, 17 aa, Artificial Sequence
  Cyclic GFR-binding peptide
  MOD_RES (3), (4): Xaa is C or S
EPXXVPEKMSPINILYF

SEQ ID NO: 13108 - protein, 19 aa, Artificial Sequence
  Cyclic GFR-binding peptide
PTKMEPISMLYLNDKQQII

SEQ ID NO: 13109 - protein, 24 aa, Artificial Sequence
  Cyclic GFR-binding peptide
  MOD_RES (6), (7): Xaa is C or S
HVPKPXXAPTKLEPISVLYLDDSS

SEQ ID NO: 13110 - protein, 21 aa, Artificial Sequence
  Cyclic GFR-binding peptide
  MOD_RES (6), (7): Xaa is C or S
GSAGPXXTPTKMEPISMLYLN

SEQ ID NO: 13111 - protein, 13 aa, Artificial Sequence
  Cyclic GFR-binding peptide
VPTRLSPISILYK

SEQ ID NO: 13112 - protein, 15 aa, Artificial Sequence
  Cyclic GFR-binding peptide
SATSILYYDAANNVV

SEQ ID NO: 13113 - protein, 19 aa, Artificial Sequence
  Cyclic GFR-binding peptide
  MOD_RES (5), (6): Xaa is C or S
ASKAXXVPTKLSATSILYY

SEQ ID NO: 13114 - protein, 24 aa, Artificial Sequence
  Cyclic GFR-binding peptide
  MOD_RES (6), (7): Xaa is C or S
GSAGPXXTPTKMSATSMLYYNDKQ

SEQ ID NO: 13115 - protein, 18 aa, Artificial Sequence
  Cyclic GFR-binding peptide
EKMSPISILYKDENKNVV

SEQ ID NO: 13116 - protein, 25 aa, Artificial Sequence
  Cyclic GFR-binding peptide
  MOD_RES (6), (7): Xaa is C or S
HVPKPXXAPTKLSPISVLYKDDSSN

SEQ ID NO: 13117 - protein, 19 aa, Artificial Sequence
  Cyclic GFR-binding peptide
PTRLEPISILYLDSANNVV

SEQ ID NO: 13118 - protein, 17 aa, Artificial Sequence
  Cyclic GFR-binding peptide
  MOD_RES (3), (4): Xaa is C or S
PTXXVPTRLSPISILYK

SEQ ID NO: 13119 - protein, 15 aa, Artificial Sequence
  Cyclic GFR-binding peptide
  MOD_RES (1), (2): Xaa is C or S
XXTPTKMSATSMLYY

SEQ ID NO: 13120 - protein, 17 aa, Artificial Sequence
  Cyclic GFR-binding peptide
RLSATSILYYDSANNVV

SEQ ID NO: 13121 - protein, 23 aa, Artificial Sequence
  Cyclic GFR-binding peptide
  MOD_RES (6), (7): Xaa is C or S
RVPSTXXAPVKTSPISMLYKDNG

SEQ ID NO: 13122 - protein, 23 aa, Artificial Sequence
  Cyclic GFR-binding peptide
  MOD_RES (6), (7): Xaa is C or S
GIPEPXXVPEKMSATSILYYDEN

SEQ ID NO: 13123 - protein, 15 aa, Artificial Sequence
  Cyclic GFR-binding peptide
  MOD_RES (1), (2): Xaa is C or S
XXVPQALSPINILYF

SEQ ID NO: 13124 - protein, 19 aa, Artificial Sequence
  Cyclic GFR-binding peptide
PVKTSPISMLYKDNGRVLL

SEQ ID NO: 13125 - protein, 27 aa, Artificial Sequence
  Cyclic GFR-binding peptide
  MOD_RES (6), (7): Xaa is C or S
ASAAPXXVPQALSPINILYFVGRKPKV

SEQ ID NO: 13126 - protein, 24 aa, Artificial Sequence
  Cyclic GFR-binding peptide
  MOD_RES (6), (7): Xaa is C or S
HVPKPXXAPTKLSATSVLYYDDSS

SEQ ID NO: 13127 - protein, 17 aa, Artificial Sequence
  Cyclic GFR-binding peptide
KMSPISILYKDENKNVV

SEQ ID NO: 13128 - protein, 18 aa, Artificial Sequence
  Cyclic GFR-binding peptide
  MOD_RES (4), (5): Xaa is C or S
PASXXVPARLSATSILYY

SEQ ID NO: 13129 - protein, 18 aa, Artificial Sequence
  Cyclic GFR-binding peptide
TRLEPISILYLDSANNVV

SEQ ID NO: 13130 - protein, 18 aa, Artificial Sequence
  Cyclic GFR-binding peptide
  MOD_RES (4), (5): Xaa is C or S
AAPXXVPQALSPINILYF

SEQ ID NO: 13131 - protein, 15 aa, Artificial Sequence
  Cyclic GFR-binding peptide
  MOD_RES (1), (2): Xaa is C or S
XXVPEKMSPINILYF

SEQ ID NO: 13132 - protein, 25 aa, Artificial Sequence
  Cyclic GFR-binding peptide
  MOD_RES (6), (7): Xaa is C or S
GIPEPXXVPEKMEPISILYLDENKN

SEQ ID NO: 13133 - protein, 23 aa, Artificial Sequence
  Cyclic GFR-binding peptide
  MOD_RES (6), (7): Xaa is C or S
STPPTXXVPTRLSPISILYKDSA

SEQ ID NO: 13134 - protein, 26 aa, Artificial Sequence
  Cyclic GFR-binding peptide
  MOD_RES (6), (7): Xaa is C or S
GIPEPXXVPEKMSATSILYYDENKNV

SEQ ID NO: 13135 - protein, 18 aa, Artificial Sequence
  Cyclic GFR-binding peptide
TKMEPISMLYLNDKQQII

SEQ ID NO: 13136 - protein, 17 aa, Artificial Sequence
  Cyclic GFR-binding peptide
KTSPISMLYKDNGRVLL

SEQ ID NO: 13137 - protein, 20 aa, Artificial Sequence
  Cyclic GFR-binding peptide
  MOD_RES (6), (7): Xaa is C or S
GIPEPXXVPEKMSPISILYK

SEQ ID NO: 13138 - protein, 27 aa, Artificial Sequence
  Cyclic GFR-binding peptide
  MOD_RES (6), (7): Xaa is C or S
STPPTXXVPTRLSPISILYKDSANNVV

SEQ ID NO: 13139 - protein, 23 aa, Artificial Sequence
  Cyclic GFR-binding peptide
  MOD_RES (6), (7): Xaa is C or S
KASKAXXVPTKLSATSILYYDKG

SEQ ID NO: 13140 - protein, 17 aa, Artificial Sequence
  Cyclic GFR-binding peptide
KMSATSMLYYNDKQQII

SEQ ID NO: 13141 - protein, 21 aa, Artificial Sequence
  Cyclic GFR-binding peptide
  MOD_RES (6), (7): Xaa is C or S
ASASPXXVPQDLSPINILYFV

SEQ ID NO: 13142 - protein, 24 aa, Artificial Sequence
  Cyclic GFR-binding peptide
  MOD_RES (6), (7): Xaa is C or S
GSAGPXXTPTKMEPISMLYLNDKQ

SEQ ID NO: 13143 - protein, 24 aa, Artificial Sequence
  Cyclic GFR-binding peptide
  MOD_RES (6), (7): Xaa is C or S
GSAGPXXTPTKMSPISMLYKNDKQ

SEQ ID NO: 13144 - protein, 27 aa, Artificial Sequence
  Cyclic GFR-binding peptide
  MOD_RES (6), (7): Xaa is C or S
RVPSTXXAPVKTSATSMLYYDNGRVLL

SEQ ID NO: 13145 - protein, 23 aa, Artificial Sequence
  Cyclic GFR-binding peptide
  MOD_RES (6), (7): Xaa is C or S
RVPSTXXAPVKTSATSMLYYDNG

SEQ ID NO: 13146 - protein, 23 aa, Artificial Sequence
  Cyclic GFR-binding peptide
  MOD_RES (6), (7): Xaa is C or S
ASAAPXXVPQALSPINILYFVGR

SEQ ID NO: 13147 - protein, 18 aa, Artificial Sequence
  Cyclic GFR-binding peptide
QALSPINILYFVGRKPKV

SEQ ID NO: 13148 - protein, 16 aa, Artificial Sequence
  Cyclic GFR-binding peptide
MEPISILYLDENKNVV

SEQ ID NO: 13149 - protein, 14 aa, Artificial Sequence
  Cyclic GFR-binding peptide
  MOD_RES (1), (1): Xaa is C or S
XTPTKMSATSMLYY

SEQ ID NO: 13150 - protein, 15 aa, Artificial Sequence
  Cyclic GFR-binding peptide
  MOD_RES (1), (2): Xaa is C or S
XXTPTKMSPISMLYK

SEQ ID NO: 13151 - protein, 16 aa, Artificial Sequence
  Cyclic GFR-binding peptide
  MOD_RES (2), (3): Xaa is C or S
PXXVSQDLSPINILYF

SEQ ID NO: 13152 - protein, 27 aa, Artificial Sequence
  Cyclic GFR-binding peptide
  MOD_RES (6), (7): Xaa is C or S
HVPKPXXAPTKLSATSVLYYDDSSNVI

SEQ ID NO: 13153 - protein, 23 aa, Artificial Sequence
  Cyclic GFR-binding peptide
  MOD_RES (6), (7): Xaa is C or S
GSAGPXXTPTKMSATSMLYYNDK

SEQ ID NO: 13154 - protein, 21 aa, Artificial Sequence
  Cyclic GFR-binding peptide
  MOD_RES (6), (7): Xaa is C or S
RVPSTXXAPVKTSPISMLYKD

SEQ ID NO: 13155 - protein, 23 aa, Artificial Sequence
  Cyclic GFR-binding peptide
  MOD_RES (6), (7): Xaa is C or S
GSAGPXXTPTKMSPISMLYKNDK

SEQ ID NO: 13156 - protein, 16 aa, Artificial Sequence
  Cyclic GFR-binding peptide
LSPISILYKDSANNVV

SEQ ID NO: 13157 - protein, 24 aa, Artificial Sequence
  Cyclic GFR-binding peptide
  MOD_RES (6), (7): Xaa is C or S
AAPASXXVPARLSATSILYYDAAN

SEQ ID NO: 13158 - protein, 15 aa, Artificial Sequence
  Cyclic GFR-binding peptide
SPISILYKDENKNVV

SEQ ID NO: 13159 - protein, 19 aa, Artificial Sequence
  Cyclic GFR-binding peptide
PEKMSPISILYKDENKNVV

SEQ ID NO: 13160 - protein, 21 aa, Artificial Sequence
  Cyclic GFR-binding peptide
  MOD_RES (6), (7): Xaa is C or S
GIPEPXXVPEKMNAISILYFD

SEQ ID NO: 13161 - protein, 21 aa, Artificial Sequence
  Cyclic GFR-binding peptide
  MOD_RES (6), (7): Xaa is C or S
HVPKPXXAPTKLEPISVLYLD

SEQ ID NO: 13162 - protein, 17 aa, Artificial Sequence
  Cyclic GFR-binding peptide
  MOD_RES (3), (4): Xaa is C or S
SPXXVSQDLSPINILYF

SEQ ID NO: 13163 - protein, 16 aa, Artificial Sequence
  Cyclic GFR-binding peptide
TSATSMLYYDNGRVLL

SEQ ID NO: 13164 - protein, 20 aa, Artificial Sequence
  Cyclic GFR-binding peptide
  MOD_RES (6), (7): Xaa is C or S
ASASPXXVPQDLSPINILYF

SEQ ID NO: 13165 - protein, 15 aa, Artificial Sequence
  Cyclic GFR-binding peptide
SATSMLYYNDKQQII

SEQ ID NO: 13166 - protein, 19 aa, Artificial Sequence
  Cyclic GFR-binding peptide
  MOD_RES (5), (6): Xaa is C or S
SAAPXXVPQALSPINILYF

SEQ ID NO: 13167 - protein, 22 aa, Artificial Sequence
  Cyclic GFR-binding peptide
  MOD_RES (6), (7): Xaa is C or S
ASASPXXVSQDLSPINILYFIG

SEQ ID NO: 13168 - protein, 14 aa, Artificial Sequence
  Cyclic GFR-binding peptide
  MOD_RES (1), (1): Xaa is C or S
XTPTKMSPISMLYK

SEQ ID NO: 13169 - protein, 21 aa, Artificial Sequence
  Cyclic GFR-binding peptide
  MOD_RES (6), (7): Xaa is C or S
ASASPXXVSQDLSPINILYFI

SEQ ID NO: 13170 - protein, 14 aa, Artificial Sequence
  Cyclic GFR-binding peptide
  MOD_RES (1), (1): Xaa is C or S
XVPEKMSPINILYF

SEQ ID NO: 13171 - protein, 15 aa, Artificial Sequence
  Cyclic GFR-binding peptide
LLVRGNDMIQMTINS

SEQ ID NO: 13172 - protein, 27 aa, Artificial Sequence
  Cyclic GFR-binding peptide
  MOD_RES (21), (22): Xaa is C or S
LLVRGNDMIQMTINSTKVPAXXTSPVR

SEQ ID NO: 13173 - protein, 14 aa, Artificial Sequence
  Cyclic GFR-binding peptide
  MOD_RES (14), (14): Xaa is C or S
MIQMTINSMKTPTX

SEQ ID NO: 13174 - protein, 27 aa, Artificial Sequence
  Cyclic GFR-binding peptide
  MOD_RES (21), (22): Xaa is C or S
VVNNAADMIQITINSLRAPVXXSAPAA

SEQ ID NO: 13175 - protein, 24 aa, Artificial Sequence
  Cyclic GFR-binding peptide
  MOD_RES (18), (19): Xaa is C or S
NAADMIQITINSLRAPVXXSAPAA

SEQ ID NO: 13176 - protein, 16 aa, Artificial Sequence
  Cyclic GFR-binding peptide
  MOD_RES (14), (15): Xaa is C or S
MIQMTINSTKVPAXXT

SEQ ID NO: 13177 - protein, 23 aa, Artificial Sequence
  Cyclic GFR-binding peptide
  MOD_RES (17), (18): Xaa is C or S
KDNMIQMTINSMKTPTXXPGASG

SEQ ID NO: 13178 - protein, 16 aa, Artificial Sequence
  Cyclic GFR-binding peptide
IIQQKDNMIQMTINSM

SEQ ID NO: 13179 - protein, 24 aa, Artificial Sequence
  Cyclic GFR-binding peptide
  MOD_RES (18), (19): Xaa is C or S
QKDNMIQMTINSMKTPTXXPGASG

SEQ ID NO: 13180 - protein, 13 aa, Artificial Sequence
  Cyclic GFR-binding peptide
MIQMTINSTKVPA

SEQ ID NO: 13181 - protein, 23 aa, Artificial Sequence
  Cyclic GFR-binding peptide
  MOD_RES (17), (18): Xaa is C or S
AADMIQITINSLRAPVXXSAPAA

SEQ ID NO: 13182 - protein, 22 aa, Artificial Sequence
  Cyclic GFR-binding peptide
  MOD_RES (16), (17): Xaa is C or S
ADMIQITINSLRAPVXXSAPAA

SEQ ID NO: 13183 - protein, 16 aa, Artificial Sequence
  Cyclic GFR-binding peptide
  MOD_RES (14), (15): Xaa is C or S
MIQITINSLRAPVXXS

SEQ ID NO: 13184 - protein, 15 aa, Artificial Sequence
  Cyclic GFR-binding peptide
VVNNAADMIQITINS

SEQ ID NO: 13185 - protein, 15 aa, Artificial Sequence
  Cyclic GFR-binding peptide
  MOD_RES (14), (15): Xaa is C or S
MIQMTINSTKVPAXX

SEQ ID NO: 13186 - protein, 24 aa, Artificial Sequence
  Cyclic GFR-binding peptide
  MOD_RES (18), (19): Xaa is C or S
SSDDMIQVTINSLKTPAXXPKPVH

SEQ ID NO: 13187 - protein, 15 aa, Artificial Sequence
  Cyclic GFR-binding peptide
VVNNASDMIQITINS

SEQ ID NO: 13188 - protein, 25 aa, Artificial Sequence
  Cyclic GFR-binding peptide
  MOD_RES (19), (20): Xaa is C or S
NSSDDMIQVTINSLKTPAXXPKPVH

SEQ ID NO: 13189 - protein, 15 aa, Artificial Sequence
  Cyclic GFR-binding peptide
  MOD_RES (14), (15): Xaa is C or S
MIQITINSLRTPVXX

SEQ ID NO: 13190 - protein, 27 aa, Artificial Sequence
  Cyclic GFR-binding peptide
  MOD_RES (21), (22): Xaa is C or S
IVNSSDDMIQVTINSLKTPAXXPKPVH

SEQ ID NO: 13191 - protein, 23 aa, Artificial Sequence
  Cyclic GFR-binding peptide
  MOD_RES (17), (18): Xaa is C or S
SDDMIQVTINSLKTPAXXPKPVH

SEQ ID NO: 13192 - protein, 19 aa, Artificial Sequence
  Cyclic GFR-binding peptide
IIQQKDNMIQMTINSMKTP

SEQ ID NO: 13193 - protein, 22 aa, Artificial Sequence
  Cyclic GFR-binding peptide
  MOD_RES (16), (17): Xaa is C or S
SDMIQITINSLRTPVXXTPPTS

SEQ ID NO: 13194 - protein, 25 aa, Artificial Sequence
  Cyclic GFR-binding peptide
  MOD_RES (19), (20): Xaa is C or S
QQKDNMIQMTINSMKTPTXXPGASG

SEQ ID NO: 13195 - protein, 26 aa, Artificial Sequence
  Cyclic GFR-binding peptide
  MOD_RES (20), (21): Xaa is C or S
VNSSDDMIQVTINSLKTPAXXPKPVH

SEQ ID NO: 13196 - protein, 19 aa, Artificial Sequence
  Cyclic GFR-binding peptide
  MOD_RES (14), (15): Xaa is C or S
MIQMTINSTKVPAXXTSPV

SEQ ID NO: 13197 - protein, 17 aa, Artificial Sequence
  Cyclic GFR-binding peptide
  MOD_RES (14), (15): Xaa is C or S
MIQITINSLRAPVXXSA

SEQ ID NO: 13198 - protein, 21 aa, Artificial Sequence
  Cyclic GFR-binding peptide
  MOD_RES (15), (16): Xaa is C or S
DMIQVTINSLKTPAXXPKPVH

SEQ ID NO: 13199 - protein, 20 aa, Artificial Sequence
  Cyclic GFR-binding peptide
  MOD_RES (14), (15): Xaa is C or S
MIQMTINSTKVPAXXTSPVR

SEQ ID NO: 13200 - protein, 25 aa, Artificial Sequence
  Cyclic GFR-binding peptide
  MOD_RES (19), (20): Xaa is C or S
VRGNDMIQMTINSTKVPAXXTSPVR

SEQ ID NO: 13201 - protein, 19 aa, Artificial Sequence
  Cyclic GFR-binding peptide
VVNNASDMIQITINSLRTP

SEQ ID NO: 13202 - protein, 27 aa, Artificial Sequence
  Cyclic GFR-binding peptide
  MOD_RES (21), (22): Xaa is C or S
IIQQKDNMIQMTINSMKTPTXXPGASG

SEQ ID NO: 13203 - protein, 20 aa, Artificial Sequence
  Cyclic GFR-binding peptide
  MOD_RES (14), (15): Xaa is C or S
MIQMTINSMKTPTXXPGASG

SEQ ID NO: 13204 - protein, 14 aa, Artificial Sequence
  Cyclic GFR-binding peptide
  MOD_RES (14), (14): Xaa is C or S
MIQITINSLRTPVX

SEQ ID NO: 13205 - protein, 13 aa, Artificial Sequence
  Cyclic GFR-binding peptide
MIQITINSLRAPV

SEQ ID NO: 13206 - protein, 20 aa, Artificial Sequence
  Cyclic GFR-binding peptide
  MOD_RES (14), (15): Xaa is C or S
MIQVTINSLKTPAXXPKPVH

SEQ ID NO: 13207 - protein, 16 aa, Artificial Sequence
  Cyclic GFR-binding peptide
LLVRGNDMIQMTINST

SEQ ID NO: 13208 - protein, 27 aa, Artificial Sequence
  Cyclic GFR-binding peptide
  MOD_RES (21), (22): Xaa is C or S
VVNNASDMIQITINSLRTPVXXTPPTS

SEQ ID NO: 13209 - protein, 24 aa, Artificial Sequence
  Cyclic GFR-binding peptide
  MOD_RES (18), (19): Xaa is C or S
RGNDMIQMTINSTKVPAXXTSPVR

SEQ ID NO: 13210 - protein, 15 aa, Artificial Sequence
  Cyclic GFR-binding peptide
IIQQKDNMIQMTINS

SEQ ID NO: 13211 - protein, 18 aa, Artificial Sequence
  Cyclic GFR-binding peptide
  MOD_RES (14), (15): Xaa is C or S
MIQITINSLRAPVXXSAP

SEQ ID NO: 13212 - protein, 16 aa, Artificial Sequence
  Cyclic GFR-binding peptide
VVNNAADMIQITINSL

SEQ ID NO: 13213 - protein, 14 aa, Artificial Sequence
  Cyclic GFR-binding peptide
  MOD_RES (14), (14): Xaa is C or S
MIQMTINSTKVPAX

SEQ ID NO: 13214 - protein, 17 aa, Artificial Sequence
  Cyclic GFR-binding peptide
LLVRGNDMIQMTINSTK

SEQ ID NO: 13215 - protein, 19 aa, Artificial Sequence
  Cyclic GFR-binding peptide
  MOD_RES (14), (15): Xaa is C or S
MIQITINSLRTPVXXTPPT

SEQ ID NO: 13216 - protein, 17 aa, Artificial Sequence
  Cyclic GFR-binding peptide
VVNNASDMIQITINSLR

SEQ ID NO: 13217 - protein, 16 aa, Artificial Sequence
  Cyclic GFR-binding peptide
VVNNASDMIQITINSL

SEQ ID NO: 13218 - protein, 22 aa, Artificial Sequence
  Cyclic GFR-binding peptide
  MOD_RES (16), (17): Xaa is C or S
DDMIQVTINSLKTPAXXPKPVH

SEQ ID NO: 13219 - protein, 21 aa, Artificial Sequence
  Cyclic GFR-binding peptide
  MOD_RES (15), (16): Xaa is C or S
DMIQITINSLRTPVXXTPPTS

SEQ ID NO: 13220 - protein, 21 aa, Artificial Sequence
  Cyclic GFR-binding peptide
  MOD_RES (15), (16): Xaa is C or S
DMIQITINSLRAPVXXSAPAA

SEQ ID NO: 13221 - protein, 18 aa, Artificial Sequence
  Cyclic GFR-binding peptide
  MOD_RES (14), (15): Xaa is C or S
MIQMTINSMKTPTXXPGA

SEQ ID NO: 13222 - protein, 16 aa, Artificial Sequence
  Cyclic GFR-binding peptide
  MOD_RES (14), (15): Xaa is C or S
MIQMTINSMKTPTXXP

SEQ ID NO: 13223 - protein, 25 aa, Artificial Sequence
  Cyclic GFR-binding peptide
  MOD_RES (19), (20): Xaa is C or S
NNAADMIQITINSLRAPVXXSAPAA

SEQ ID NO: 13224 - protein, 15 aa, Artificial Sequence
  Cyclic GFR-binding peptide
  MOD_RES (14), (15): Xaa is C or S
MIQITINSLRAPVXX

SEQ ID NO: 13225 - protein, 26 aa, Artificial Sequence
  Cyclic GFR-binding peptide
  MOD_RES (20), (21): Xaa is C or S
IQQKDNMIQMTINSMKTPTXXPGASG

SEQ ID NO: 13226 - protein, 18 aa, Artificial Sequence
  Cyclic GFR-binding peptide
LLVRGNDMIQMTINSTKV

SEQ ID NO: 13227 - protein, 13 aa, Artificial Sequence
  Cyclic GFR-binding peptide
MIQITINSLRTPV

SEQ ID NO: 13228 - protein, 15 aa, Artificial Sequence
  Cyclic GFR-binding peptide
  MOD_RES (14), (15): Xaa is C or S
MIQMTINSMKTPTXX

SEQ ID NO: 13229 - protein, 25 aa, Artificial Sequence
  Cyclic GFR-binding peptide
  MOD_RES (19), (20): Xaa is C or S
NNASDMIQITINSLRTPVXXTPPTS

SEQ ID NO: 13230 - protein, 16 aa, Artificial Sequence
  Cyclic GFR-binding peptide
  MOD_RES (14), (15): Xaa is C or S
MIQITINSLRTPVXXT

SEQ ID NO: 13231 - protein, 18 aa, Artificial Sequence
  Cyclic GFR-binding peptide
VVNNASDMIQITINSLRT

SEQ ID NO: 13232 - protein, 26 aa, Artificial Sequence
  Cyclic GFR-binding peptide
  MOD_RES (20), (21): Xaa is C or S
VNNASDMIQITINSLRTPVXXTPPTS

SEQ ID NO: 13233 - protein, 18 aa, Artificial Sequence
  Cyclic GFR-binding peptide
  MOD_RES (14), (15): Xaa is C or S
MIQITINSLRTPVXXTPP

SEQ ID NO: 13234 - protein, 17 aa, Artificial Sequence
  Cyclic GFR-binding peptide
  MOD_RES (14), (15): Xaa is C or S
MIQMTINSMKTPTXXPG

SEQ ID NO: 13235 - protein, 13 aa, Artificial Sequence
  Cyclic GFR-binding peptide
MIQMTINSMKTPT

SEQ ID NO: 13236 - protein, 18 aa, Artificial Sequence
  Cyclic GFR-binding peptide
VVNNAADMIQITINSLRA

SEQ ID NO: 13237 - protein, 22 aa, Artificial Sequence
  Cyclic GFR-binding peptide
  MOD_RES (16), (17): Xaa is C or S
NDMIQMTINSTKVPAXXTSPVR

SEQ ID NO: 13238 - protein, 24 aa, Artificial Sequence
  Cyclic GFR-binding peptide
  MOD_RES (18), (19): Xaa is C or S
NASDMIQITINSLRTPVXXTPPTS

SEQ ID NO: 13239 - protein, 18 aa, Artificial Sequence
  Cyclic GFR-binding peptide
  MOD_RES (14), (15): Xaa is C or S
MIQMTINSTKVPAXXTSP

SEQ ID NO: 13240 - protein, 17 aa, Artificial Sequence
  Cyclic GFR-binding peptide
VVNNAADMIQITINSLR

SEQ ID NO: 13241 - protein, 17 aa, Artificial Sequence
  Cyclic GFR-binding peptide
  MOD_RES (14), (15): Xaa is C or S
MIQMTINSTKVPAXXTS

SEQ ID NO: 13242 - protein, 23 aa, Artificial Sequence
  Cyclic GFR-binding peptide
  MOD_RES (17), (18): Xaa is C or S
GNDMIQMTINSTKVPAXXTSPVR

SEQ ID NO: 13243 - protein, 17 aa, Artificial Sequence
  Cyclic GFR-binding peptide
IIQQKDNMIQMTINSMK

SEQ ID NO: 13244 - protein, 21 aa, Artificial Sequence
  Cyclic GFR-binding peptide
  MOD_RES (15), (16): Xaa is C or S
DMIQMTINSTKVPAXXTSPVR

SEQ ID NO: 13245 - protein, 19 aa, Artificial Sequence
  Cyclic GFR-binding peptide
VVNNAADMIQITINSLRAP

SEQ ID NO: 13246 - protein, 26 aa, Artificial Sequence
  Cyclic GFR-binding peptide
  MOD_RES (20), (21): Xaa is C or S
LVRGNDMIQMTINSTKVPAXXTSPVR

SEQ ID NO: 13247 - protein, 19 aa, Artificial Sequence
  Cyclic GFR-binding peptide
  MOD_RES (14), (15): Xaa is C or S
MIQITINSLRAPVXXSAPA

SEQ ID NO: 13248 - protein, 17 aa, Artificial Sequence
  Cyclic GFR-binding peptide
  MOD_RES (14), (15): Xaa is C or S
MIQITINSLRTPVXXTP

SEQ ID NO: 13249 - protein, 22 aa, Artificial Sequence
  Cyclic GFR-binding peptide
  MOD_RES (16), (17): Xaa is C or S
DNMIQMTINSMKTPTXXPGASG

SEQ ID NO: 13250 - protein, 18 aa, Artificial Sequence
  Cyclic GFR-binding peptide
IIQQKDNMIQMTINSMKT

SEQ ID NO: 13251 - protein, 20 aa, Artificial Sequence
  Cyclic GFR-binding peptide
  MOD_RES (14), (15): Xaa is C or S
MIQITINSLRTPVXXTPPTS

SEQ ID NO: 13252 - protein, 21 aa, Artificial Sequence
  Cyclic GFR-binding peptide
  MOD_RES (15), (16): Xaa is C or S
NMIQMTINSMKTPTXXPGASG

SEQ ID NO: 13253 - protein, 14 aa, Artificial Sequence
  Cyclic GFR-binding peptide
  MOD_RES (14), (14): Xaa is C or S
MIQITINSLRAPVX

SEQ ID NO: 13254 - protein, 26 aa, Artificial Sequence
  Cyclic GFR-binding peptide
  MOD_RES (20), (21): Xaa is C or S
VNNAADMIQITINSLRAPVXXSAPAA

SEQ ID NO: 13255 - protein, 23 aa, Artificial Sequence
  Cyclic GFR-binding peptide
  MOD_RES (17), (18): Xaa is C or S
ASDMIQITINSLRTPVXXTPPTS

SEQ ID NO: 13256 - protein, 19 aa, Artificial Sequence
  Cyclic GFR-binding peptide
  MOD_RES (14), (15): Xaa is C or S
MIQMTINSMKTPTXXPGAS

SEQ ID NO: 13257 - protein, 19 aa, Artificial Sequence
  Cyclic GFR-binding peptide
LLVRGNDMIQMTINSTKVP

SEQ ID NO: 13258 - protein, 20 aa, Artificial Sequence
  Cyclic GFR-binding peptide
  MOD_RES (14), (15): Xaa is C or S
MIQITINSLRAPVXXSAPAA

SEQ ID NO: 13259 - protein, 15 aa, Artificial Sequence
  Cyclic GFR-binding peptide
SNITMQIMDNGRVLL

SEQ ID NO: 13260 - protein, 27 aa, Artificial Sequence
  Cyclic GFR-binding peptide
  MOD_RES (6), (7): Xaa is C or S
RVPSTXXAPVKTSNITMQIMDNGRVLL

SEQ ID NO: 13261 - protein, 14 aa, Artificial Sequence
  Cyclic GFR-binding peptide
  MOD_RES (1), (1): Xaa is C or S
XTPTKMSNITMQIM

SEQ ID NO: 13262 - protein, 27 aa, Artificial Sequence
  Cyclic GFR-binding peptide
  MOD_RES (6), (7): Xaa is C or S
AAPASXXVPARLSNITIQIMDAANNVV

SEQ ID NO: 13263 - protein, 24 aa, Artificial Sequence
  Cyclic GFR-binding peptide
  MOD_RES (6), (7): Xaa is C or S
AAPASXXVPARLSNITIQIMDAAN

SEQ ID NO: 13264 - protein, 16 aa, Artificial Sequence
  Cyclic GFR-binding peptide
  MOD_RES (2), (3): Xaa is C or S
TXXAPVKTSNITMQIM

SEQ ID NO: 13265 - protein, 23 aa, Artificial Sequence
  Cyclic GFR-binding peptide
  MOD_RES (6), (7): Xaa is C or S
GSAGPXXTPTKMSNITMQIMNDK

SEQ ID NO: 13266 - protein, 16 aa, Artificial Sequence
  Cyclic GFR-binding peptide
MSNITMQIMNDKQQII

SEQ ID NO: 13267 - protein, 24 aa, Artificial Sequence
  Cyclic GFR-binding peptide
  MOD_RES (6), (7): Xaa is C or S
GSAGPXXTPTKMSNITMQIMNDKQ

SEQ ID NO: 13268 - protein, 13 aa, Artificial Sequence
  Cyclic GFR-binding peptide
APVKTSNITMQIM

SEQ ID NO: 13269 - protein, 23 aa, Artificial Sequence
  Cyclic GFR-binding peptide
  MOD_RES (6), (7): Xaa is C or S
AAPASXXVPARLSNITIQIMDAA

SEQ ID NO: 13270 - protein, 22 aa, Artificial Sequence
  Cyclic GFR-binding peptide
  MOD_RES (6), (7): Xaa is C or S
AAPASXXVPARLSNITIQIMDA

SEQ ID NO: 13271 - protein, 16 aa, Artificial Sequence
  Cyclic GFR-binding peptide
  MOD_RES (2), (3): Xaa is C or S
SXXVPARLSNITIQIM

SEQ ID NO: 13272 - protein, 15 aa, Artificial Sequence
  Cyclic GFR-binding peptide
SNITIQIMDAANNVV

SEQ ID NO: 13273 - protein, 15 aa, Artificial Sequence
  Cyclic GFR-binding peptide
  MOD_RES (1), (2): Xaa is C or S
XXAPVKTSNITMQIM

SEQ ID NO: 13274 - protein, 24 aa, Artificial Sequence
  Cyclic GFR-binding peptide
  MOD_RES (6), (7): Xaa is C or S
HVPKPXXAPTKLSNITVQIMDDSS

SEQ ID NO: 13275 - protein, 15 aa, Artificial Sequence
  Cyclic GFR-binding peptide
SNITIQIMDSANNVV

SEQ ID NO: 13276 - protein, 25 aa, Artificial Sequence
  Cyclic GFR-binding peptide
  MOD_RES (6), (7): Xaa is C or S
HVPKPXXAPTKLSNITVQIMDDSSN

SEQ ID NO: 13277 - protein, 15 aa, Artificial Sequence
  Cyclic GFR-binding peptide
  MOD_RES (1), (2): Xaa is C or S
XXVPTRLSNITIQIM

SEQ ID NO: 13278 - protein, 27 aa, Artificial Sequence
  Cyclic GFR-binding peptide
  MOD_RES (6), (7): Xaa is C or S
HVPKPXXAPTKLSNITVQIMDDSSNVI

SEQ ID NO: 13279 - protein, 23 aa, Artificial Sequence
  Cyclic GFR-binding peptide
  MOD_RES (6), (7): Xaa is C or S
HVPKPXXAPTKLSNITVQIMDDS

SEQ ID NO: 13280 - protein, 19 aa, Artificial Sequence
  Cyclic GFR-binding peptide
PTKMSNITMQIMNDKQQII

SEQ ID NO: 13281 - protein, 22 aa, Artificial Sequence
  Cyclic GFR-binding peptide
  MOD_RES (6), (7): Xaa is C or S
STPPTXXVPTRLSNITIQIMDS

SEQ ID NO: 13282 - protein, 25 aa, Artificial Sequence
  Cyclic GFR-binding peptide
  MOD_RES (6), (7): Xaa is C or S
GSAGPXXTPTKMSNITMQIMNDKQQ

SEQ ID NO: 13283 - protein, 26 aa, Artificial Sequence
  Cyclic GFR-binding peptide
  MOD_RES (6), (7): Xaa is C or S
HVPKPXXAPTKLSNITVQIMDDSSNV

SEQ ID NO: 13284 - protein, 19 aa, Artificial Sequence
  Cyclic GFR-binding peptide
  MOD_RES (5), (6): Xaa is C or S
VPSTXXAPVKTSNITMQIM

SEQ ID NO: 13285 - protein, 17 aa, Artificial Sequence
  Cyclic GFR-binding peptide
  MOD_RES (3), (4): Xaa is C or S
ASXXVPARLSNITIQIM

SEQ ID NO: 13286 - protein, 21 aa, Artificial Sequence
  Cyclic GFR-binding peptide
  MOD_RES (6), (7): Xaa is C or S
HVPKPXXAPTKLSNITVQIMD

SEQ ID NO: 13287 - protein, 20 aa, Artificial Sequence
  Cyclic GFR-binding peptide
  MOD_RES (6), (7): Xaa is C or S
RVPSTXXAPVKTSNITMQIM

SEQ ID NO: 13288 - protein, 25 aa, Artificial Sequence
  Cyclic GFR-binding peptide
  MOD_RES (6), (7): Xaa is C or S
RVPSTXXAPVKTSNITMQIMDNGRV

SEQ ID NO: 13289 - protein, 19 aa, Artificial Sequence
  Cyclic GFR-binding peptide
PTRLSNITIQIMDSANNVV

SEQ ID NO: 13290 - protein, 27 aa, Artificial Sequence
  Cyclic GFR-binding peptide
  MOD_RES (6), (7): Xaa is C or S
GSAGPXXTPTKMSNITMQIMNDKQQII

SEQ ID NO: 13291 - protein, 20 aa, Artificial Sequence
  Cyclic GFR-binding peptide
  MOD_RES (6), (7): Xaa is C or S
GSAGPXXTPTKMSNITMQIM

SEQ ID NO: 13292 - protein, 14 aa, Artificial Sequence
  Cyclic GFR-binding peptide
  MOD_RES (1), (1): Xaa is C or S
XVPTRLSNITIQIM

SEQ ID NO: 13293 - protein, 13 aa, Artificial Sequence
  Cyclic GFR-binding peptide
VPARLSNITIQIM

SEQ ID NO: 13294 - protein, 20 aa, Artificial Sequence
  Cyclic GFR-binding peptide
  MOD_RES (6), (7): Xaa is C or S
HVPKPXXAPTKLSNITVQIM

SEQ ID NO: 13295 - protein, 16 aa, Artificial Sequence
  Cyclic GFR-binding peptide
TSNITMQIMDNGRVLL

SEQ ID NO: 13296 - protein, 27 aa, Artificial Sequence
  Cyclic GFR-binding peptide
  MOD_RES (6), (7): Xaa is C or S
STPPTXXVPTRLSNITIQIMDSANNVV

SEQ ID NO: 13297 - protein, 24 aa, Artificial Sequence
  Cyclic GFR-binding peptide
  MOD_RES (6), (7): Xaa is C or S
RVPSTXXAPVKTSNITMQIMDNGR

SEQ ID NO: 13298 - protein, 15 aa, Artificial Sequence
  Cyclic GFR-binding peptide
SNITMQIMNDKQQII

SEQ ID NO: 13299 - protein, 18 aa, Artificial Sequence
  Cyclic GFR-binding peptide
  MOD_RES (4), (5): Xaa is C or S
PASXXVPARLSNITIQIM

SEQ ID NO: 13300 - protein, 16 aa, Artificial Sequence
  Cyclic GFR-binding peptide
LSNITIQIMDAANNVV

SEQ ID NO: 13301 - protein, 14 aa, Artificial Sequence
  Cyclic GFR-binding peptide
  MOD_RES (1), (1): Xaa is C or S
XAPVKTSNITMQIM

SEQ ID NO: 13302 - protein, 17 aa, Artificial Sequence
  Cyclic GFR-binding peptide
KTSNITMQIMDNGRVLL

SEQ ID NO: 13303 - protein, 19 aa, Artificial Sequence
  Cyclic GFR-binding peptide
  MOD_RES (5), (6): Xaa is C or S
TPPTXXVPTRLSNITIQIM

SEQ ID NO: 13304 - protein, 17 aa, Artificial Sequence
  Cyclic GFR-binding peptide
RLSNITIQIMDSANNVV

SEQ ID NO: 13305 - protein, 16 aa, Artificial Sequence
  Cyclic GFR-binding peptide
LSNITIQIMDSANNVV

SEQ ID NO: 13306 - protein, 22 aa, Artificial Sequence
  Cyclic GFR-binding peptide
  MOD_RES (6), (7): Xaa is C or S
HVPKPXXAPTKLSNITVQIMDD

SEQ ID NO: 13307 - protein, 21 aa, Artificial Sequence
  Cyclic GFR-binding peptide
  MOD_RES (6), (7): Xaa is C or S
STPPTXXVPTRLSNITIQIMD

SEQ ID NO: 13308 - protein, 21 aa, Artificial Sequence
  Cyclic GFR-binding peptide
  MOD_RES (6), (7): Xaa is C or S
AAPASXXVPARLSNITIQIMD

SEQ ID NO: 13309 - protein, 18 aa, Artificial Sequence
  Cyclic GFR-binding peptide
  MOD_RES (4), (5): Xaa is C or S
AGPXXTPTKMSNITMQIM

SEQ ID NO: 13310 - protein, 16 aa, Artificial Sequence
  Cyclic GFR-binding peptide
  MOD_RES (2), (3): Xaa is C or S
PXXTPTKMSNITMQIM

SEQ ID NO: 13311 - protein, 25 aa, Artificial Sequence
  Cyclic GFR-binding peptide
  MOD_RES (6), (7): Xaa is C or S
AAPASXXVPARLSNITIQIMDAANN

SEQ ID NO: 13312 - protein, 15 aa, Artificial Sequence
  Cyclic GFR-binding peptide
  MOD_RES (1), (2): Xaa is C or S
XXVPARLSNITIQIM

SEQ ID NO: 13313 - protein, 26 aa, Artificial Sequence
  Cyclic GFR-binding peptide
  MOD_RES (6), (7): Xaa is C or S
GSAGPXXTPTKMSNITMQIMNDKQQI

SEQ ID NO: 13314 - protein, 18 aa, Artificial Sequence
  Cyclic GFR-binding peptide
VKTSNITMQIMDNGRVLL

SEQ ID NO: 13315 - protein, 13 aa, Artificial Sequence
  Cyclic GFR-binding peptide
VPTRLSNITIQIM

SEQ ID NO: 13316 - protein, 15 aa, Artificial Sequence
  Cyclic GFR-binding peptide
  MOD_RES (1), (2): Xaa is C or S
XXTPTKMSNITMQIM

SEQ ID NO: 13317 - protein, 25 aa, Artificial Sequence
  Cyclic GFR-binding peptide
  MOD_RES (6), (7): Xaa is C or S
STPPTXXVPTRLSNITIQIMDSANN

SEQ ID NO: 13318 - protein, 16 aa, Artificial Sequence
  Cyclic GFR-binding peptide
  MOD_RES (2), (3): Xaa is C or S
TXXVPTRLSNITIQIM

SEQ ID NO: 13319 - protein, 18 aa, Artificial Sequence
  Cyclic GFR-binding peptide
TRLSNITIQIMDSANNVV

SEQ ID NO: 13320 - protein, 26 aa, Artificial Sequence
  Cyclic GFR-binding peptide
  MOD_RES (6), (7): Xaa is C or S
STPPTXXVPTRLSNITIQIMDSANNV

SEQ ID NO: 13321 - protein, 18 aa, Artificial Sequence
  Cyclic GFR-binding peptide
  MOD_RES (4), (5): Xaa is C or S
PPTXXVPTRLSNITIQIM

SEQ ID NO: 13322 - protein, 17 aa, Artificial Sequence
  Cyclic GFR-binding peptide
  MOD_RES (3), (4): Xaa is C or S
GPXXTPTKMSNITMQIM

SEQ ID NO: 13323 - protein, 13 aa, Artificial Sequence
  Cyclic GFR-binding peptide
TPTKMSNITMQIM

SEQ ID NO: 13324 - protein, 18 aa, Artificial Sequence
  Cyclic GFR-binding peptide
ARLSNITIQIMDAANNVV

SEQ ID NO: 13325 - protein, 22 aa, Artificial Sequence
  Cyclic GFR-binding peptide
  MOD_RES (6), (7): Xaa is C or S
RVPSTXXAPVKTSNITMQIMDN

SEQ ID NO: 13326 - protein, 24 aa, Artificial Sequence
  Cyclic GFR-binding peptide
  MOD_RES (6), (7): Xaa is C or S
STPPTXXVPTRLSNITIQIMDSAN

SEQ ID NO: 13327 - protein, 18 aa, Artificial Sequence
  Cyclic GFR-binding peptide
  MOD_RES (4), (5): Xaa is C or S
PSTXXAPVKTSNITMQIM

SEQ ID NO: 13328 - protein, 17 aa, Artificial Sequence
  Cyclic GFR-binding peptide
RLSNITIQIMDAANNVV

SEQ ID NO: 13329 - protein, 17 aa, Artificial Sequence
  Cyclic GFR-binding peptide
  MOD_RES (3), (4): Xaa is C or S
STXXAPVKTSNITMQIM

SEQ ID NO: 13330 - protein, 23 aa, Artificial Sequence
  Cyclic GFR-binding peptide
  MOD_RES (6), (7): Xaa is C or S
RVPSTXXAPVKTSNITMQIMDNG

SEQ ID NO: 13331 - protein, 17 aa, Artificial Sequence
  Cyclic GFR-binding peptide
KMSNITMQIMNDKQQII

SEQ ID NO: 13332 - protein, 21 aa, Artificial Sequence
  Cyclic GFR-binding peptide
  MOD_RES (6), (7): Xaa is C or S
RVPSTXXAPVKTSNITMQIMD

SEQ ID NO: 13333 - protein, 19 aa, Artificial Sequence
  Cyclic GFR-binding peptide
PARLSNITIQIMDAANNVV

SEQ ID NO: 13334 - protein, 26 aa, Artificial Sequence
  Cyclic GFR-binding peptide
  MOD_RES (6), (7): Xaa is C or S
RVPSTXXAPVKTSNITMQIMDNGRVL

SEQ ID NO: 13335 - protein, 19 aa, Artificial Sequence
  Cyclic GFR-binding peptide
  MOD_RES (5), (6): Xaa is C or S
APASXXVPARLSNITIQIM

SEQ ID NO: 13336 - protein, 17 aa, Artificial Sequence
  Cyclic GFR-binding peptide
  MOD_RES (3), (4): Xaa is C or S
PTXXVPTRLSNITIQIM

SEQ ID NO: 13337 - protein, 22 aa, Artificial Sequence
  Cyclic GFR-binding peptide
  MOD_RES (6), (7): Xaa is C or S
GSAGPXXTPTKMSNITMQIMND

SEQ ID NO: 13338 - protein, 18 aa, Artificial Sequence
  Cyclic GFR-binding peptide
TKMSNITMQIMNDKQQII

SEQ ID NO: 13339 - protein, 20 aa, Artificial Sequence
  Cyclic GFR-binding peptide
  MOD_RES (6), (7): Xaa is C or S
STPPTXXVPTRLSNITIQIM

SEQ ID NO: 13340 - protein, 21 aa, Artificial Sequence
  Cyclic GFR-binding peptide
  MOD_RES (6), (7): Xaa is C or S
GSAGPXXTPTKMSNITMQIMN

SEQ ID NO: 13341 - protein, 14 aa, Artificial Sequence
  Cyclic GFR-binding peptide
  MOD_RES (1), (1): Xaa is C or S
XVPARLSNITIQIM

SEQ ID NO: 13342 - protein, 26 aa, Artificial Sequence
  Cyclic GFR-binding peptide
  MOD_RES (6), (7): Xaa is C or S
AAPASXXVPARLSNITIQIMDAANNV

SEQ ID NO: 13343 - protein, 23 aa, Artificial Sequence
  Cyclic GFR-binding peptide
  MOD_RES (6), (7): Xaa is C or S
STPPTXXVPTRLSNITIQIMDSA

SEQ ID NO: 13344 - protein, 19 aa, Artificial Sequence
  Cyclic GFR-binding peptide
  MOD_RES (5), (6): Xaa is C or S
SAGPXXTPTKMSNITMQIM

SEQ ID NO: 13345 - protein, 19 aa, Artificial Sequence
  Cyclic GFR-binding peptide
PVKTSNITMQIMDNGRVLL

SEQ ID NO: 13346 - protein, 20 aa, Artificial Sequence
  Cyclic GFR-binding peptide
  MOD_RES (6), (7): Xaa is C or S
AAPASXXVPARLSNITIQIM

SEQ ID NO: 13347 - protein, 22 aa, Artificial Sequence
  Cyclic GFR-binding peptide
  MOD_RES (16), (17): Xaa is C or S
DDLYLVSIASLKTPAXXPKPVH

SEQ ID NO: 13348 - protein, 16 aa, Artificial Sequence
  Cyclic GFR-binding peptide
IIQQKDNLYLMSIASM

SEQ ID NO: 13349 - protein, 25 aa, Artificial Sequence
  Cyclic GFR-binding peptide
  MOD_RES (19), (20): Xaa is C or S
NNAADLYLISIASLRAPVXXSAPAA

SEQ ID NO: 13350 - protein, 21 aa, Artificial Sequence
  Cyclic GFR-binding peptide
  MOD_RES (15), (16): Xaa is C or S
NLYLMSIASMKTPTXXPGASG

SEQ ID NO: 13351 - protein, 15 aa, Artificial Sequence
  Cyclic GFR-binding peptide
  MOD_RES (14), (15): Xaa is C or S
LYLISIASLRAPVXX

SEQ ID NO: 13352 - protein, 19 aa, Artificial Sequence
  Cyclic GFR-binding peptide
  MOD_RES (14), (15): Xaa is C or S
LYLISIASMKEPVXXPEPI

SEQ ID NO: 13353 - protein, 14 aa, Artificial Sequence
  Cyclic GFR-binding peptide
  MOD_RES (14), (14): Xaa is C or S
LYLISIASMKEPVX

SEQ ID NO: 13354 - protein, 14 aa, Artificial Sequence
  Cyclic GFR-binding peptide
  MOD_RES (14), (14): Xaa is C or S
LYLMSIASTKVPAX

SEQ ID NO: 13355 - protein, 18 aa, Artificial Sequence
  Cyclic GFR-binding peptide
YTVVGKDLYLISIASLKT

SEQ ID NO: 13356 - protein, 27 aa, Artificial Sequence
  Cyclic GFR-binding peptide
  MOD_RES (21), (22): Xaa is C or S
IVNSSDDLYLVSIASLKTPAXXPKPVH

SEQ ID NO: 13357 - protein, 22 aa, Artificial Sequence
  Cyclic GFR-binding peptide
  MOD_RES (16), (17): Xaa is C or S
EDLYLISIASMKEPVXXPEPIG

SEQ ID NO: 13358 - protein, 15 aa, Artificial Sequence
  Cyclic GFR-binding peptide
VVNNAADLYLISIAS

SEQ ID NO: 13359 - protein, 20 aa, Artificial Sequence
  Cyclic GFR-binding peptide
  MOD_RES (14), (15): Xaa is C or S
LYLMSIASTKVPAXXTSPVR

SEQ ID NO: 13360 - protein, 13 aa, Artificial Sequence
  Cyclic GFR-binding peptide
LYLISIASLRAPV

SEQ ID NO: 13361 - protein, 23 aa, Artificial Sequence
  Cyclic GFR-binding peptide
  MOD_RES (17), (18): Xaa is C or S
SDDLYLVSIASLKTPAXXPKPVH

SEQ ID NO: 13362 - protein, 20 aa, Artificial Sequence
  Cyclic GFR-binding peptide
  MOD_RES (14), (15): Xaa is C or S
LYLMSIASMKTPTXXPGASG

SEQ ID NO: 13363 - protein, 15 aa, Artificial Sequence
  Cyclic GFR-binding peptide
  MOD_RES (14), (15): Xaa is C or S
LYLISIASMKEPVXX

SEQ ID NO: 13364 - protein, 25 aa, Artificial Sequence
  Cyclic GFR-binding peptide
  MOD_RES (19), (20): Xaa is C or S
QQKDNLYLMSIASMKTPTXXPGASG

SEQ ID NO: 13365 - protein, 19 aa, Artificial Sequence
  Cyclic GFR-binding peptide
  MOD_RES (14), (15): Xaa is C or S
LYLISIASLRAPVXXSAPA

SEQ ID NO: 13366 - protein, 21 aa, Artificial Sequence
  Cyclic GFR-binding peptide
  MOD_RES (15), (16): Xaa is C or S
DLYLISIASLRAPVXXSAPAA

SEQ ID NO: 13367 - protein, 19 aa, Artificial Sequence
  Cyclic GFR-binding peptide
  MOD_RES (14), (15): Xaa is C or S
LYLMSIASTKVPAXXTSPV

SEQ ID NO: 13368 - protein, 21 aa, Artificial Sequence
  Cyclic GFR-binding peptide
  MOD_RES (15), (16): Xaa is C or S
DLYLISIASMKEPVXXPEPIG

SEQ ID NO: 13369 - protein, 17 aa, Artificial Sequence
  Cyclic GFR-binding peptide
  MOD_RES (14), (15): Xaa is C or S
LYLMSIASMKTPTXXPG

SEQ ID NO: 13370 - protein, 13 aa, Artificial Sequence
  Cyclic GFR-binding peptide
LYLISIASMKEPV

SEQ ID NO: 13371 - protein, 26 aa, Artificial Sequence
  Cyclic GFR-binding peptide
  MOD_RES (20), (21): Xaa is C or S
LVRGNDLYLMSIASTKVPAXXTSPVR

SEQ ID NO: 13372 - protein, 27 aa, Artificial Sequence
  Cyclic GFR-binding peptide
  MOD_RES (21), (22): Xaa is C or S
VVNKNEDLYLISIASMKEPVXXPEPIG

SEQ ID NO: 13373 - protein, 15 aa, Artificial Sequence
  Cyclic GFR-binding peptide
IIQQKDNLYLMSIAS

SEQ ID NO: 13374 - protein, 14 aa, Artificial Sequence
  Cyclic GFR-binding peptide
  MOD_RES (14), (14): Xaa is C or S
LYLISIASLKTPVX

SEQ ID NO: 13375 - protein, 27 aa, Artificial Sequence
  Cyclic GFR-binding peptide
  MOD_RES (21), (22): Xaa is C or S
IIQQKDNLYLMSIASMKTPTXXPGASG

SEQ ID NO: 13376 - protein, 17 aa, Artificial Sequence
  Cyclic GFR-binding peptide
VVNKNEDLYLISIASMK

SEQ ID NO: 13377 - protein, 16 aa, Artificial Sequence
  Cyclic GFR-binding peptide
  MOD_RES (14), (15): Xaa is C or S
LYLISIASLRAPVXXS

SEQ ID NO: 13378 - protein, 17 aa, Artificial Sequence
  Cyclic GFR-binding peptide
  MOD_RES (14), (15): Xaa is C or S
LYLISIASLKTPVXXAK

SEQ ID NO: 13379 - protein, 14 aa, Artificial Sequence
  Cyclic GFR-binding peptide
  MOD_RES (14), (14): Xaa is C or S
LYLMSIASMKTPTX

SEQ ID NO: 13380 - protein, 26 aa, Artificial Sequence
  Cyclic GFR-binding peptide
  MOD_RES (20), (21): Xaa is C or S
VNNAADLYLISIASLRAPVXXSAPAA

SEQ ID NO: 13381 - protein, 20 aa, Artificial Sequence
  Cyclic GFR-binding peptide
  MOD_RES (14), (15): Xaa is C or S
LYLISIASLKTPVXXAKSAK

SEQ ID NO: 13382 - protein, 18 aa, Artificial Sequence
  Cyclic GFR-binding peptide
LLVRGNDLYLMSIASTKV

SEQ ID NO: 13383 - protein, 24 aa, Artificial Sequence
  Cyclic GFR-binding peptide
  MOD_RES (18), (19): Xaa is C or S
NAADLYLISIASLRAPVXXSAPAA

SEQ ID NO: 13384 - protein, 16 aa, Artificial Sequence
  Cyclic GFR-binding peptide
  MOD_RES (14), (15): Xaa is C or S
LYLISIASMKEPVXXP

SEQ ID NO: 13385 - protein, 25 aa, Artificial Sequence
  Cyclic GFR-binding peptide
  MOD_RES (19), (20): Xaa is C or S
VVGKDLYLISIASLKTPVXXAKSAK

SEQ ID NO: 13386 - protein, 15 aa, Artificial Sequence
  Cyclic GFR-binding peptide
  MOD_RES (14), (15): Xaa is C or S
LYLISIASLKTPVXX

SEQ ID NO: 13387 - protein, 17 aa, Artificial Sequence
  Cyclic GFR-binding peptide
VVNNAADLYLISIASLR

SEQ ID NO: 13388 - protein, 19 aa, Artificial Sequence
  Cyclic GFR-binding peptide
VVNNAADLYLISIASLRAP

SEQ ID NO: 13389 - protein, 17 aa, Artificial Sequence
  Cyclic GFR-binding peptide
  MOD_RES (14), (15): Xaa is C or S
LYLMSIASTKVPAXXTS

SEQ ID NO: 13390 - protein, 24 aa, Artificial Sequence
  Cyclic GFR-binding peptide
  MOD_RES (18), (19): Xaa is C or S
SSDDLYLVSIASLKTPAXXPKPVH

SEQ ID NO: 13391 - protein, 15 aa, Artificial Sequence
  Cyclic GFR-binding peptide
LLVRGNDLYLMSIAS

SEQ ID NO: 13392 - protein, 18 aa, Artificial Sequence
  Cyclic GFR-binding peptide
  MOD_RES (14), (15): Xaa is C or S
LYLMSIASTKVPAXXTSP

SEQ ID NO: 13393 - protein, 25 aa, Artificial Sequence
  Cyclic GFR-binding peptide
  MOD_RES (19), (20): Xaa is C or S
VRGNDLYLMSIASTKVPAXXTSPVR

SEQ ID NO: 13394 - protein, 18 aa, Artificial Sequence
  Cyclic GFR-binding peptide
IIQQKDNLYLMSIASMKT

SEQ ID NO: 13395 - protein, 17 aa, Artificial Sequence
  Cyclic GFR-binding peptide
  MOD_RES (14), (15): Xaa is C or S
LYLISIASMKEPVXXPE

SEQ ID NO: 13396 - protein, 16 aa, Artificial Sequence
  Cyclic GFR-binding peptide
  MOD_RES (14), (15): Xaa is C or S
LYLMSIASTKVPAXXT

SEQ ID NO: 13397 - protein, 18 aa, Artificial Sequence
  Cyclic GFR-binding peptide
VVNKNEDLYLISIASMKE

SEQ ID NO: 13398 - protein, 23 aa, Artificial Sequence
  Cyclic GFR-binding peptide
  MOD_RES (17), (18): Xaa is C or S
GNDLYLMSIASTKVPAXXTSPVR

SEQ ID NO: 13399 - protein, 16 aa, Artificial Sequence
  Cyclic GFR-binding peptide
  MOD_RES (14), (15): Xaa is C or S
LYLMSIASMKTPTXXP

SEQ ID NO: 13400 - protein, 13 aa, Artificial Sequence
  Cyclic GFR-binding peptide
LYLISIASLKTPV

SEQ ID NO: 13401 - protein, 22 aa, Artificial Sequence
  Cyclic GFR-binding peptide
  MOD_RES (16), (17): Xaa is C or S
KDLYLISIASLKTPVXXAKSAK

SEQ ID NO: 13402 - protein, 17 aa, Artificial Sequence
  Cyclic GFR-binding peptide
LLVRGNDLYLMSIASTK

SEQ ID NO: 13403 - protein, 19 aa, Artificial Sequence
  Cyclic GFR-binding peptide
IIQQKDNLYLMSIASMKTP

SEQ ID NO: 13404 - protein, 27 aa, Artificial Sequence
  Cyclic GFR-binding peptide
  MOD_RES (21), (22): Xaa is C or S
VVNNAADLYLISIASLRAPVXXSAPAA

SEQ ID NO: 13405 - protein, 24 aa, Artificial Sequence
  Cyclic GFR-binding peptide
  MOD_RES (18), (19): Xaa is C or S
VGKDLYLISIASLKTPVXXAKSAK

SEQ ID NO: 13406 - protein, 18 aa, Artificial Sequence
  Cyclic GFR-binding peptide
  MOD_RES (14), (15): Xaa is C or S
LYLISIASLRAPVXXSAP

SEQ ID NO: 13407 - protein, 18 aa, Artificial Sequence
  Cyclic GFR-binding peptide
  MOD_RES (14), (15): Xaa is C or S
LYLISIASMKEPVXXPEP

SEQ ID NO: 13408 - protein, 18 aa, Artificial Sequence
  Cyclic GFR-binding peptide
  MOD_RES (14), (15): Xaa is C or S
LYLMSIASMKTPTXXPGA

SEQ ID NO: 13409 - protein, 24 aa, Artificial Sequence
  Cyclic GFR-binding peptide
  MOD_RES (18), (19): Xaa is C or S
RGNDLYLMSIASTKVPAXXTSPVR

SEQ ID NO: 13410 - protein, 17 aa, Artificial Sequence
  Cyclic GFR-binding peptide
YTVVGKDLYLISIASLK

SEQ ID NO: 13411 - protein, 27 aa, Artificial Sequence
  Cyclic GFR-binding peptide
  MOD_RES (21), (22): Xaa is C or S
LLVRGNDLYLMSIASTKVPAXXTSPVR

SEQ ID NO: 13412 - protein, 25 aa, Artificial Sequence
  Cyclic GFR-binding peptide
  MOD_RES (19), (20): Xaa is C or S
NSSDDLYLVSIASLKTPAXXPKPVH

SEQ ID NO: 13413 - protein, 20 aa, Artificial Sequence
  Cyclic GFR-binding peptide
  MOD_RES (14), (15): Xaa is C or S
LYLVSIASLKTPAXXPKPVH

SEQ ID NO: 13414 - protein, 18 aa, Artificial Sequence
  Cyclic GFR-binding peptide
VVNNAADLYLISIASLRA

SEQ ID NO: 13415 - protein, 16 aa, Artificial Sequence
  Cyclic GFR-binding peptide
  MOD_RES (14), (15): Xaa is C or S
LYLISIASLKTPVXXA

SEQ ID NO: 13416 - protein, 16 aa, Artificial Sequence
  Cyclic GFR-binding peptide
LLVRGNDLYLMSIAST

SEQ ID NO: 13417 - protein, 24 aa, Artificial Sequence
  Cyclic GFR-binding peptide
  MOD_RES (18), (19): Xaa is C or S
KNEDLYLISIASMKEPVXXPEPIG

SEQ ID NO: 13418 - protein, 21 aa, Artificial Sequence
  Cyclic GFR-binding peptide
  MOD_RES (15), (16): Xaa is C or S
DLYLISIASLKTPVXXAKSAK

SEQ ID NO: 13419 - protein, 13 aa, Artificial Sequence
  Cyclic GFR-binding peptide
LYLMSIASMKTPT

SEQ ID NO: 13420 - protein, 16 aa, Artificial Sequence
  Cyclic GFR-binding peptide
VVNNAADLYLISIASL

SEQ ID NO: 13421 - protein, 25 aa, Artificial Sequence
  Cyclic GFR-binding peptide
  MOD_RES (19), (20): Xaa is C or S
NKNEDLYLISIASMKEPVXXPEPIG

SEQ ID NO: 13422 - protein, 26 aa, Artificial Sequence
  Cyclic GFR-binding peptide
  MOD_RES (20), (21): Xaa is C or S
VNKNEDLYLISIASMKEPVXXPEPIG

SEQ ID NO: 13423 - protein, 21 aa, Artificial Sequence
  Cyclic GFR-binding peptide
  MOD_RES (15), (16): Xaa is C or S
DLYLVSIASLKTPAXXPKPVH

SEQ ID NO: 13424 - protein, 26 aa, Artificial Sequence
  Cyclic GFR-binding peptide
  MOD_RES (20), (21): Xaa is C or S
TVVGKDLYLISIASLKTPVXXAKSAK

SEQ ID NO: 13425 - protein, 15 aa, Artificial Sequence
  Cyclic GFR-binding peptide
  MOD_RES (14), (15): Xaa is C or S
LYLMSIASMKTPTXX

SEQ ID NO: 13426 - protein, 16 aa, Artificial Sequence
  Cyclic GFR-binding peptide
VVNKNEDLYLISIASM

SEQ ID NO: 13427 - protein, 15 aa, Artificial Sequence
  Cyclic GFR-binding peptide
YTVVGKDLYLISIAS

SEQ ID NO: 13428 - protein, 22 aa, Artificial Sequence
  Cyclic GFR-binding peptide
  MOD_RES (16), (17): Xaa is C or S
ADLYLISIASLRAPVXXSAPAA

SEQ ID NO: 13429 - protein, 20 aa, Artificial Sequence
  Cyclic GFR-binding peptide
  MOD_RES (14), (15): Xaa is C or S
LYLISIASMKEPVXXPEPIG

SEQ ID NO: 13430 - protein, 23 aa, Artificial Sequence
  Cyclic GFR-binding peptide
  MOD_RES (17), (18): Xaa is C or S
NEDLYLISIASMKEPVXXPEPIG

SEQ ID NO: 13431 - protein, 20 aa, Artificial Sequence
  Cyclic GFR-binding peptide
  MOD_RES (14), (15): Xaa is C or S
LYLISIASLRAPVXXSAPAA

SEQ ID NO: 13432 - protein, 26 aa, Artificial Sequence
  Cyclic GFR-binding peptide
  MOD_RES (20), (21): Xaa is C or S
IQQKDNLYLMSIASMKTPTXXPGASG

SEQ ID NO: 13433 - protein, 23 aa, Artificial Sequence
  Cyclic GFR-binding peptide
  MOD_RES (17), (18): Xaa is C or S
GKDLYLISIASLKTPVXXAKSAK

SEQ ID NO: 13434 - protein, 27 aa, Artificial Sequence
  Cyclic GFR-binding peptide
  MOD_RES (21), (22): Xaa is C or S
YTVVGKDLYLISIASLKTPVXXAKSAK

SEQ ID NO: 13435 - protein, 19 aa, Artificial Sequence
  Cyclic GFR-binding peptide
VVNKNEDLYLISIASMKEP

SEQ ID NO: 13436 - protein, 22 aa, Artificial Sequence
  Cyclic GFR-binding peptide
  MOD_RES (16), (17): Xaa is C or S
DNLYLMSIASMKTPTXXPGASG

SEQ ID NO: 13437 - protein, 21 aa, Artificial Sequence
  Cyclic GFR-binding peptide
  MOD_RES (15), (16): Xaa is C or S
DLYLMSIASTKVPAXXTSPVR

SEQ ID NO: 13438 - protein, 17 aa, Artificial Sequence
  Cyclic GFR-binding peptide
  MOD_RES (14), (15): Xaa is C or S
LYLISIASLRAPVXXSA

SEQ ID NO: 13439 - protein, 19 aa, Artificial Sequence
  Cyclic GFR-binding peptide
  MOD_RES (14), (15): Xaa is C or S
LYLISIASLKTPVXXAKSA

SEQ ID NO: 13440 - protein, 16 aa, Artificial Sequence
  Cyclic GFR-binding peptide
YTVVGKDLYLISIASL

SEQ ID NO: 13441 - protein, 14 aa, Artificial Sequence
  Cyclic GFR-binding peptide
  MOD_RES (14), (14): Xaa is C or S
LYLISIASLRAPVX

SEQ ID NO: 13442 - protein, 19 aa, Artificial Sequence
  Cyclic GFR-binding peptide
  MOD_RES (14), (15): Xaa is C or S
LYLMSIASMKTPTXXPGAS

SEQ ID NO: 13443 - protein, 26 aa, Artificial Sequence
  Cyclic GFR-binding peptide
  MOD_RES (20), (21): Xaa is C or S
VNSSDDLYLVSIASLKTPAXXPKPVH

SEQ ID NO: 13444 - protein, 19 aa, Artificial Sequence
  Cyclic GFR-binding peptide
LLVRGNDLYLMSIASTKVP

SEQ ID NO: 13445 - protein, 23 aa, Artificial Sequence
  Cyclic GFR-binding peptide
  MOD_RES (17), (18): Xaa is C or S
KDNLYLMSIASMKTPTXXPGASG

SEQ ID NO: 13446 - protein, 22 aa, Artificial Sequence
  Cyclic GFR-binding peptide
  MOD_RES (16), (17): Xaa is C or S
NDLYLMSIASTKVPAXXTSPVR

SEQ ID NO: 13447 - protein, 15 aa, Artificial Sequence
  Cyclic GFR-binding peptide
VVNKNEDLYLISIAS

SEQ ID NO: 13448 - protein, 19 aa, Artificial Sequence
  Cyclic GFR-binding peptide
YTVVGKDLYLISIASLKTP

SEQ ID NO: 13449 - protein, 13 aa, Artificial Sequence
  Cyclic GFR-binding peptide
LYLMSIASTKVPA

SEQ ID NO: 13450 - protein, 23 aa, Artificial Sequence
  Cyclic GFR-binding peptide
  MOD_RES (17), (18): Xaa is C or S
AADLYLISIASLRAPVXXSAPAA

SEQ ID NO: 13451 - protein, 24 aa, Artificial Sequence
  Cyclic GFR-binding peptide
  MOD_RES (18), (19): Xaa is C or S
QKDNLYLMSIASMKTPTXXPGASG

SEQ ID NO: 13452 - protein, 15 aa, Artificial Sequence
  Cyclic GFR-binding peptide
  MOD_RES (14), (15): Xaa is C or S
LYLMSIASTKVPAXX

SEQ ID NO: 13453 - protein, 18 aa, Artificial Sequence
  Cyclic GFR-binding peptide
  MOD_RES (14), (15): Xaa is C or S
LYLISIASLKTPVXXAKS

SEQ ID NO: 13454 - protein, 17 aa, Artificial Sequence
  Cyclic GFR-binding peptide
IIQQKDNLYLMSIASMK

SEQ ID NO: 13455 - protein, 22 aa, Artificial Sequence
  Cyclic GFR-binding peptide
  MOD_RES (6), (7): Xaa is C or S
HVPKPXXAPTKLSAISVLYLDD

SEQ ID NO: 13456 - protein, 16 aa, Artificial Sequence
  Cyclic GFR-binding peptide
MSAISMLYLNDKQQII

SEQ ID NO: 13457 - protein, 25 aa, Artificial Sequence
  Cyclic GFR-binding peptide
  MOD_RES (6), (7): Xaa is C or S
AAPASXXVPARLSAISILYLDAANN

SEQ ID NO: 13458 - protein, 21 aa, Artificial Sequence
  Cyclic GFR-binding peptide
  MOD_RES (6), (7): Xaa is C or S
GSAGPXXTPTKMSAISMLYLN

SEQ ID NO: 13459 - protein, 15 aa, Artificial Sequence
  Cyclic GFR-binding peptide
  MOD_RES (1), (2): Xaa is C or S
XXVPARLSAISILYL

SEQ ID NO: 13460 - protein, 19 aa, Artificial Sequence
  Cyclic GFR-binding peptide
  MOD_RES (5), (6): Xaa is C or S
IPEPXXVPEKMSAISILYL

SEQ ID NO: 13461 - protein, 14 aa, Artificial Sequence
  Cyclic GFR-binding peptide
  MOD_RES (1), (1): Xaa is C or S
XVPEKMSAISILYL

SEQ ID NO: 13462 - protein, 14 aa, Artificial Sequence
  Cyclic GFR-binding peptide
  MOD_RES (1), (1): Xaa is C or S
XAPVKTSAISMLYL

SEQ ID NO: 13463 - protein, 18 aa, Artificial Sequence
  Cyclic GFR-binding peptide
TKLSAISILYLDKGVVTY

SEQ ID NO: 13464 - protein, 27 aa, Artificial Sequence
  Cyclic GFR-binding peptide
  MOD_RES (6), (7): Xaa is C or S
HVPKPXXAPTKLSAISVLYLDDSSNVI

SEQ ID NO: 13465 - protein, 22 aa, Artificial Sequence
  Cyclic GFR-binding peptide
  MOD_RES (6), (7): Xaa is C or S
GIPEPXXVPEKMSAISILYLDE

SEQ ID NO: 13466 - protein, 15 aa, Artificial Sequence
  Cyclic GFR-binding peptide
SAISILYLDAANNVV

SEQ ID NO: 13467 - protein, 20 aa, Artificial Sequence
  Cyclic GFR-binding peptide
  MOD_RES (6), (7): Xaa is C or S
RVPSTXXAPVKTSAISMLYL

SEQ ID NO: 13468 - protein, 13 aa, Artificial Sequence
  Cyclic GFR-binding peptide
VPARLSAISILYL

SEQ ID NO: 13469 - protein, 23 aa, Artificial Sequence
  Cyclic GFR-binding peptide
  MOD_RES (6), (7): Xaa is C or S
HVPKPXXAPTKLSAISVLYLDDS

SEQ ID NO: 13470 - protein, 20 aa, Artificial Sequence
  Cyclic GFR-binding peptide
  MOD_RES (6), (7): Xaa is C or S
GSAGPXXTPTKMSAISMLYL

SEQ ID NO: 13471 - protein, 15 aa, Artificial Sequence
  Cyclic GFR-binding peptide
  MOD_RES (1), (2): Xaa is C or S
XXVPEKMSAISILYL

SEQ ID NO: 13472 - protein, 25 aa, Artificial Sequence
  Cyclic GFR-binding peptide
  MOD_RES (6), (7): Xaa is C or S
GSAGPXXTPTKMSAISMLYLNDKQQ

SEQ ID NO: 13473 - protein, 19 aa, Artificial Sequence
  Cyclic GFR-binding peptide
  MOD_RES (5), (6): Xaa is C or S
APASXXVPARLSAISILYL

SEQ ID NO: 13474 - protein, 21 aa, Artificial Sequence
  Cyclic GFR-binding peptide
  MOD_RES (6), (7): Xaa is C or S
AAPASXXVPARLSAISILYLD

SEQ ID NO: 13475 - protein, 19 aa, Artificial Sequence
  Cyclic GFR-binding peptide
  MOD_RES (5), (6): Xaa is C or S
VPSTXXAPVKTSAISMLYL

SEQ ID NO: 13476 - protein, 21 aa, Artificial Sequence
  Cyclic GFR-binding peptide
  MOD_RES (6), (7): Xaa is C or S
GIPEPXXVPEKMSAISILYLD

SEQ ID NO: 13477 - protein, 17 aa, Artificial Sequence
  Cyclic GFR-binding peptide
  MOD_RES (3), (4): Xaa is C or S
GPXXTPTKMSAISMLYL

SEQ ID NO: 13478 - protein, 13 aa, Artificial Sequence
  Cyclic GFR-binding peptide
VPEKMSAISILYL

SEQ ID NO: 13479 - protein, 26 aa, Artificial Sequence
  Cyclic GFR-binding peptide
  MOD_RES (6), (7): Xaa is C or S
RVPSTXXAPVKTSAISMLYLDNGRVL

SEQ ID NO: 13480 - protein, 27 aa, Artificial Sequence
  Cyclic GFR-binding peptide
  MOD_RES (6), (7): Xaa is C or S
GIPEPXXVPEKMSAISILYLDENKNVV

SEQ ID NO: 13481 - protein, 15 aa, Artificial Sequence
  Cyclic GFR-binding peptide
SAISMLYLNDKQQII

SEQ ID NO: 13482 - protein, 14 aa, Artificial Sequence
  Cyclic GFR-binding peptide
  MOD_RES (1), (1): Xaa is C or S
XVPTKLSAISILYL

SEQ ID NO: 13483 - protein, 27 aa, Artificial Sequence
  Cyclic GFR-binding peptide
  MOD_RES (6), (7): Xaa is C or S
GSAGPXXTPTKMSAISMLYLNDKQQII

SEQ ID NO: 13484 - protein, 17 aa, Artificial Sequence
  Cyclic GFR-binding peptide
KMSAISILYLDENKNVV

SEQ ID NO: 13485 - protein, 16 aa, Artificial Sequence
  Cyclic GFR-binding peptide
  MOD_RES (2), (3): Xaa is C or S
SXXVPARLSAISILYL

SEQ ID NO: 13486 - protein, 17 aa, Artificial Sequence
  Cyclic GFR-binding peptide
  MOD_RES (3), (4): Xaa is C or S
KAXXVPTKLSAISILYL

SEQ ID NO: 13487 - protein, 14 aa, Artificial Sequence
  Cyclic GFR-binding peptide
  MOD_RES (1), (1): Xaa is C or S
XTPTKMSAISMLYL

SEQ ID NO: 13488 - protein, 26 aa, Artificial Sequence
  Cyclic GFR-binding peptide
  MOD_RES (6), (7): Xaa is C or S
AAPASXXVPARLSAISILYLDAANNV

SEQ ID NO: 13489 - protein, 20 aa, Artificial Sequence
  Cyclic GFR-binding peptide
  MOD_RES (6), (7): Xaa is C or S
KASKAXXVPTKLSAISILYL

SEQ ID NO: 13490 - protein, 18 aa, Artificial Sequence
  Cyclic GFR-binding peptide
VKTSAISMLYLDNGRVLL

SEQ ID NO: 13491 - protein, 24 aa, Artificial Sequence
  Cyclic GFR-binding peptide
  MOD_RES (6), (7): Xaa is C or S
AAPASXXVPARLSAISILYLDAAN

SEQ ID NO: 13492 - protein, 16 aa, Artificial Sequence
  Cyclic GFR-binding peptide
  MOD_RES (2), (3): Xaa is C or S
PXXVPEKMSAISILYL

SEQ ID NO: 13493 - protein, 25 aa, Artificial Sequence
  Cyclic GFR-binding peptide
  MOD_RES (6), (7): Xaa is C or S
KASKAXXVPTKLSAISILYLDKGVV

SEQ ID NO: 13494 - protein, 15 aa, Artificial Sequence
  Cyclic GFR-binding peptide
  MOD_RES (1), (2): Xaa is C or S
XXVPTKLSAISILYL

SEQ ID NO: 13495 - protein, 17 aa, Artificial Sequence
  Cyclic GFR-binding peptide
RLSAISILYLDAANNVV

SEQ ID NO: 13496 - protein, 19 aa, Artificial Sequence
  Cyclic GFR-binding peptide
PARLSAISILYLDAANNVV

SEQ ID NO: 13497 - protein, 17 aa, Artificial Sequence
  Cyclic GFR-binding peptide
  MOD_RES (3), (4): Xaa is C or S
STXXAPVKTSAISMLYL

SEQ ID NO: 13498 - protein, 24 aa, Artificial Sequence
  Cyclic GFR-binding peptide
  MOD_RES (6), (7): Xaa is C or S
HVPKPXXAPTKLSAISVLYLDDSS

SEQ ID NO: 13499 - protein, 15 aa, Artificial Sequence
  Cyclic GFR-binding peptide
SAISMLYLDNGRVLL

SEQ ID NO: 13500 - protein, 18 aa, Artificial Sequence
  Cyclic GFR-binding peptide
  MOD_RES (4), (5): Xaa is C or S
PSTXXAPVKTSAISMLYL

SEQ ID NO: 13501 - protein, 25 aa, Artificial Sequence
  Cyclic GFR-binding peptide
  MOD_RES (6), (7): Xaa is C or S
RVPSTXXAPVKTSAISMLYLDNGRV

SEQ ID NO: 13502 - protein, 18 aa, Artificial Sequence
  Cyclic GFR-binding peptide
TKMSAISMLYLNDKQQII

SEQ ID NO: 13503 - protein, 17 aa, Artificial Sequence
  Cyclic GFR-binding peptide
  MOD_RES (3), (4): Xaa is C or S
EPXXVPEKMSAISILYL

SEQ ID NO: 13504 - protein, 16 aa, Artificial Sequence
  Cyclic GFR-binding peptide
  MOD_RES (2), (3): Xaa is C or S
TXXAPVKTSAISMLYL

SEQ ID NO: 13505 - protein, 18 aa, Artificial Sequence
  Cyclic GFR-binding peptide
EKMSAISILYLDENKNVV

SEQ ID NO: 13506 - protein, 23 aa, Artificial Sequence
  Cyclic GFR-binding peptide
  MOD_RES (6), (7): Xaa is C or S
RVPSTXXAPVKTSAISMLYLDNG

SEQ ID NO: 13507 - protein, 16 aa, Artificial Sequence
  Cyclic GFR-binding peptide
  MOD_RES (2), (3): Xaa is C or S
PXXTPTKMSAISMLYL

SEQ ID NO: 13508 - protein, 13 aa, Artificial Sequence
  Cyclic GFR-binding peptide
VPTKLSAISILYL

SEQ ID NO: 13509 - protein, 22 aa, Artificial Sequence
  Cyclic GFR-binding peptide
  MOD_RES (6), (7): Xaa is C or S
KASKAXXVPTKLSAISILYLDK

SEQ ID NO: 13510 - protein, 17 aa, Artificial Sequence
  Cyclic GFR-binding peptide
KTSAISMLYLDNGRVLL

SEQ ID NO: 13511 - protein, 19 aa, Artificial Sequence
  Cyclic GFR-binding peptide
PTKMSAISMLYLNDKQQII

SEQ ID NO: 13512 - protein, 27 aa, Artificial Sequence
  Cyclic GFR-binding peptide
  MOD_RES (6), (7): Xaa is C or S
AAPASXXVPARLSAISILYLDAANNVV

SEQ ID NO: 13513 - protein, 24 aa, Artificial Sequence
  Cyclic GFR-binding peptide
  MOD_RES (6), (7): Xaa is C or S
KASKAXXVPTKLSAISILYLDKGV

SEQ ID NO: 13514 - protein, 18 aa, Artificial Sequence
  Cyclic GFR-binding peptide
  MOD_RES (4), (5): Xaa is C or S
PASXXVPARLSAISILYL

SEQ ID NO: 13515 - protein, 18 aa, Artificial Sequence
  Cyclic GFR-binding peptide
  MOD_RES (4), (5): Xaa is C or S
PEPXXVPEKMSAISILYL

SEQ ID NO: 13516 - protein, 18 aa, Artificial Sequence
  Cyclic GFR-binding peptide
  MOD_RES (4), (5): Xaa is C or S
AGPXXTPTKMSAISMLYL

SEQ ID NO: 13517 - protein, 24 aa, Artificial Sequence
  Cyclic GFR-binding peptide
  MOD_RES (6), (7): Xaa is C or S
RVPSTXXAPVKTSAISMLYLDNGR

SEQ ID NO: 13518 - protein, 17 aa, Artificial Sequence
  Cyclic GFR-binding peptide
KLSAISILYLDKGVVTY

SEQ ID NO: 13519 - protein, 27 aa, Artificial Sequence
  Cyclic GFR-binding peptide
  MOD_RES (6), (7): Xaa is C or S
RVPSTXXAPVKTSAISMLYLDNGRVLL

SEQ ID NO: 13520 - protein, 25 aa, Artificial Sequence
  Cyclic GFR-binding peptide
  MOD_RES (6), (7): Xaa is C or S
HVPKPXXAPTKLSAISVLYLDDSSN

SEQ ID NO: 13521 - protein, 20 aa, Artificial Sequence
  Cyclic GFR-binding peptide
  MOD_RES (6), (7): Xaa is C or S
HVPKPXXAPTKLSAISVLYL

SEQ ID NO: 13522 - protein, 18 aa, Artificial Sequence
  Cyclic GFR-binding peptide
ARLSAISILYLDAANNVV

SEQ ID NO: 13523 - protein, 16 aa, Artificial Sequence
  Cyclic GFR-binding peptide
  MOD_RES (2), (3): Xaa is C or S
AXXVPTKLSAISILYL

SEQ ID NO: 13524 - protein, 16 aa, Artificial Sequence
  Cyclic GFR-binding peptide
TSAISMLYLDNGRVLL

SEQ ID NO: 13525 - protein, 24 aa, Artificial Sequence
  Cyclic GFR-binding peptide
  MOD_RES (6), (7): Xaa is C or S
GIPEPXXVPEKMSAISILYLDENK

SEQ ID NO: 13526 - protein, 21 aa, Artificial Sequence
  Cyclic GFR-binding peptide
  MOD_RES (6), (7): Xaa is C or S
KASKAXXVPTKLSAISILYLD

SEQ ID NO: 13527 - protein, 13 aa, Artificial Sequence
  Cyclic GFR-binding peptide
TPTKMSAISMLYL

SEQ ID NO: 13528 - protein, 16 aa, Artificial Sequence
  Cyclic GFR-binding peptide
LSAISILYLDAANNVV

SEQ ID NO: 13529 - protein, 25 aa, Artificial Sequence
  Cyclic GFR-binding peptide
  MOD_RES (6), (7): Xaa is C or S
GIPEPXXVPEKMSAISILYLDENKN

SEQ ID NO: 13530 - protein, 26 aa, Artificial Sequence
  Cyclic GFR-binding peptide
  MOD_RES (6), (7): Xaa is C or S
GIPEPXXVPEKMSAISILYLDENKNV

SEQ ID NO: 13531 - protein, 21 aa, Artificial Sequence
  Cyclic GFR-binding peptide
  MOD_RES (6), (7): Xaa is C or S
HVPKPXXAPTKLSAISVLYLD

SEQ ID NO: 13532 - protein, 26 aa, Artificial Sequence
  Cyclic GFR-binding peptide
  MOD_RES (6), (7): Xaa is C or S
KASKAXXVPTKLSAISILYLDKGVVT

SEQ ID NO: 13533 - protein, 15 aa, Artificial Sequence
  Cyclic GFR-binding peptide
  MOD_RES (1), (2): Xaa is C or S
XXTPTKMSAISMLYL

SEQ ID NO: 13534 - protein, 16 aa, Artificial Sequence
  Cyclic GFR-binding peptide
MSAISILYLDENKNVV

SEQ ID NO: 13535 - protein, 15 aa, Artificial Sequence
  Cyclic GFR-binding peptide
SAISILYLDKGVVTY

SEQ ID NO: 13536 - protein, 22 aa, Artificial Sequence
  Cyclic GFR-binding peptide
  MOD_RES (6), (7): Xaa is C or S
AAPASXXVPARLSAISILYLDA

SEQ ID NO: 13537 - protein, 20 aa, Artificial Sequence
  Cyclic GFR-binding peptide
  MOD_RES (6), (7): Xaa is C or S
GIPEPXXVPEKMSAISILYL

SEQ ID NO: 13538 - protein, 23 aa, Artificial Sequence
  Cyclic GFR-binding peptide
  MOD_RES (6), (7): Xaa is C or S
GIPEPXXVPEKMSAISILYLDEN

SEQ ID NO: 13539 - protein, 20 aa, Artificial Sequence
  Cyclic GFR-binding peptide
  MOD_RES (6), (7): Xaa is C or S
AAPASXXVPARLSAISILYL

SEQ ID NO: 13540 - protein, 26 aa, Artificial Sequence
  Cyclic GFR-binding peptide
  MOD_RES (6), (7): Xaa is C or S
GSAGPXXTPTKMSAISMLYLNDKQQI

SEQ ID NO: 13541 - protein, 23 aa, Artificial Sequence
  Cyclic GFR-binding peptide
  MOD_RES (6), (7): Xaa is C or S
KASKAXXVPTKLSAISILYLDKG

SEQ ID NO: 13542 - protein, 27 aa, Artificial Sequence
  Cyclic GFR-binding peptide
  MOD_RES (6), (7): Xaa is C or S
KASKAXXVPTKLSAISILYLDKGVVTY

SEQ ID NO: 13543 - protein, 19 aa, Artificial Sequence
  Cyclic GFR-binding peptide
PEKMSAISILYLDENKNVV

SEQ ID NO: 13544 - protein, 22 aa, Artificial Sequence
  Cyclic GFR-binding peptide
  MOD_RES (6), (7): Xaa is C or S
GSAGPXXTPTKMSAISMLYLND

SEQ ID NO: 13545 - protein, 21 aa, Artificial Sequence
  Cyclic GFR-binding peptide
  MOD_RES (6), (7): Xaa is C or S
RVPSTXXAPVKTSAISMLYLD

SEQ ID NO: 13546 - protein, 17 aa, Artificial Sequence
  Cyclic GFR-binding peptide
  MOD_RES (3), (4): Xaa is C or S
ASXXVPARLSAISILYL

SEQ ID NO: 13547 - protein, 19 aa, Artificial Sequence
  Cyclic GFR-binding peptide
  MOD_RES (5), (6): Xaa is C or S
ASKAXXVPTKLSAISILYL

SEQ ID NO: 13548 - protein, 16 aa, Artificial Sequence
  Cyclic GFR-binding peptide
LSAISILYLDKGVVTY

SEQ ID NO: 13549 - protein, 14 aa, Artificial Sequence
  Cyclic GFR-binding peptide
  MOD_RES (1), (1): Xaa is C or S
XVPARLSAISILYL

SEQ ID NO: 13550 - protein, 19 aa, Artificial Sequence
  Cyclic GFR-binding peptide
  MOD_RES (5), (6): Xaa is C or S
SAGPXXTPTKMSAISMLYL

SEQ ID NO: 13551 - protein, 26 aa, Artificial Sequence
  Cyclic GFR-binding peptide
  MOD_RES (6), (7): Xaa is C or S
HVPKPXXAPTKLSAISVLYLDDSSNV

SEQ ID NO: 13552 - protein, 19 aa, Artificial Sequence
  Cyclic GFR-binding peptide
PVKTSAISMLYLDNGRVLL

SEQ ID NO: 13553 - protein, 23 aa, Artificial Sequence
  Cyclic GFR-binding peptide
  MOD_RES (6), (7): Xaa is C or S
GSAGPXXTPTKMSAISMLYLNDK

SEQ ID NO: 13554 - protein, 22 aa, Artificial Sequence
  Cyclic GFR-binding peptide
  MOD_RES (6), (7): Xaa is C or S
RVPSTXXAPVKTSAISMLYLDN

SEQ ID NO: 13555 - protein, 15 aa, Artificial Sequence
  Cyclic GFR-binding peptide
SAISILYLDENKNVV

SEQ ID NO: 13556 - protein, 19 aa, Artificial Sequence
  Cyclic GFR-binding peptide
PTKLSAISILYLDKGVVTY

SEQ ID NO: 13557 - protein, 13 aa, Artificial Sequence
  Cyclic GFR-binding peptide
APVKTSAISMLYL

SEQ ID NO: 13558 - protein, 23 aa, Artificial Sequence
  Cyclic GFR-binding peptide
  MOD_RES (6), (7): Xaa is C or S
AAPASXXVPARLSAISILYLDAA

SEQ ID NO: 13559 - protein, 24 aa, Artificial Sequence
  Cyclic GFR-binding peptide
  MOD_RES (6), (7): Xaa is C or S
GSAGPXXTPTKMSAISMLYLNDKQ

SEQ ID NO: 13560 - protein, 15 aa, Artificial Sequence
  Cyclic GFR-binding peptide
  MOD_RES (1), (2): Xaa is C or S
XXAPVKTSAISMLYL

SEQ ID NO: 13561 - protein, 18 aa, Artificial Sequence
  Cyclic GFR-binding peptide
  MOD_RES (4), (5): Xaa is C or S
SKAXXVPTKLSAISILYL

SEQ ID NO: 13562 - protein, 17 aa, Artificial Sequence
  Cyclic GFR-binding peptide
KMSAISMLYLNDKQQII

SEQ ID NO: 13563 - protein, 4 aa, Artificial Sequence
  Cyclic GFR-binding peptide
EPIS

SEQ ID NO: 13564 - protein, 4 aa, Artificial Sequence
  Building block peptide "PEP"
EPLP

SEQ ID NO: 13565 - protein, 4 aa, Artificial Sequence
  Building block peptide "PEP"
EPLT

SEQ ID NO: 13566 - protein, 4 aa, Artificial Sequence
  Building block peptide "PEP"
KPLS

SEQ ID NO: 13567 - protein, 4 aa, Artificial Sequence
  Building block peptide "PEP"
NAIS

SEQ ID NO: 13568 - protein, 4 aa, Artificial Sequence
  Building block peptide "PEP"
RPVQ

SEQ ID NO: 13569 - protein, 4 aa, Artificial Sequence
  Building block peptide "PEP"
RSVK

SEQ ID NO: 13570 - protein, 4 aa, Artificial Sequence
  Building block peptide "PEP"
SAIS

SEQ ID NO: 13571 - protein, 4 aa, Artificial Sequence
  Building block peptide "PEP"
SATS

SEQ ID NO: 13572 - protein, 4 aa, Artificial Sequence
  Building block peptide "PEP"
SNIT

SEQ ID NO: 13573 - protein, 4 aa, Artificial Sequence
  Building block peptide "PEP"
SPIN

SEQ ID NO: 13574 - protein, 4 aa, Artificial Sequence
  Building block peptide "PEP"
SPIS

SEQ ID NO: 13575 - protein, 4 aa, Artificial Sequence
  Building block peptide "PEP"
SSLS

SEQ ID NO: 13576 - protein, 5 aa, Artificial Sequence
  Building block peptide "PEP"
APTAL

SEQ ID NO: 13577 - protein, 5 aa, Artificial Sequence
  Building block peptide "PEP"
APTDL

SEQ ID NO: 13578 - protein, 5 aa, Artificial Sequence
  Building block peptide "PEP"
APTEL

SEQ ID NO: 13579 - protein, 5 aa, Artificial Sequence
  Building block peptide "PEP"
APTKL

SEQ ID NO: 13580 - protein, 5 aa, Artificial Sequence
  Building block peptide "PEP"
APTKM

SEQ ID NO: 13581 - protein, 5 aa, Artificial Sequence
  Building block peptide "PEP"
APTKT

SEQ ID NO: 13582 - protein, 5 aa, Artificial Sequence
  Building block peptide "PEP"
APTQL

SEQ ID NO: 13583 - protein, 5 aa, Artificial Sequence
  Building block peptide "PEP"
APTRL

SEQ ID NO: 13584 - protein, 5 aa, Artificial Sequence
  Building block peptide "PEP"
APVAL

SEQ ID NO: 13585 - protein, 5 aa, Artificial Sequence
  Building block peptide "PEP"
APVDL

SEQ ID NO: 13586 - protein, 5 aa, Artificial Sequence
  Building block peptide "PEP"
APVEL

SEQ ID NO: 13587 - protein, 5 aa, Artificial Sequence
  Building block peptide "PEP"
APVKL

SEQ ID NO: 13588 - protein, 5 aa, Artificial Sequence
  Building block peptide "PEP"
APVKM

SEQ ID NO: 13589 - protein, 5 aa, Artificial Sequence
  Building block peptide "PEP"
APVKT

SEQ ID NO: 13590 - protein, 5 aa, Artificial Sequence
  Building block peptide "PEP"
APVQL

SEQ ID NO: 13591 - protein, 5 aa, Artificial Sequence
  Building block peptide "PEP"
APVRL

SEQ ID NO: 13592 - protein, 5 aa, Artificial Sequence
  Building block peptide "PEP"
SRVHH

SEQ ID NO: 13593 - protein, 5 aa, Artificial Sequence
  Building block peptide "PEP"
SRVQL

SEQ ID NO: 13594 - protein, 5 aa, Artificial Sequence
  Building block peptide "PEP"
TPTAL

SEQ ID NO: 13595 - protein, 5 aa, Artificial Sequence
  Building block peptide "PEP"
TPTDL

SEQ ID NO: 13596 - protein, 5 aa, Artificial Sequence
  Building block peptide "PEP"
TPTEL

SEQ ID NO: 13597 - protein, 5 aa, Artificial Sequence
  Building block peptide "PEP"
TPTKL

SEQ ID NO: 13598 - protein, 5 aa, Artificial Sequence
  Building block peptide "PEP"
TPTKM

SEQ ID NO: 13599 - protein, 5 aa, Artificial Sequence
  Building block peptide "PEP"
TPTKT

SEQ ID NO: 13600 - protein, 5 aa, Artificial Sequence
  Building block peptide "PEP"
TPTQL

SEQ ID NO: 13601 - protein, 5 aa, Artificial Sequence
  Building block peptide "PEP"
TPTRL

SEQ ID NO: 13602 - protein, 5 aa, Artificial Sequence
  Building block peptide "PEP"
TQVHH

SEQ ID NO: 13603 - protein, 5 aa, Artificial Sequence
  Building block peptide "PEP"
TQVQL

SEQ ID NO: 13604 - protein, 5 aa, Artificial Sequence
  Building block peptide "PEP"
VPAAL

SEQ ID NO: 13605 - protein, 5 aa, Artificial Sequence
  Building block peptide "PEP"
VPADL

SEQ ID NO: 13606 - protein, 5 aa, Artificial Sequence
  Building block peptide "PEP"
VPAEL

SEQ ID NO: 13607 - protein, 5 aa, Artificial Sequence
  Building block peptide "PEP"
VPAKL

SEQ ID NO: 13608 - protein, 5 aa, Artificial Sequence
  Building block peptide "PEP"
VPAKM

SEQ ID NO: 13609 - protein, 5 aa, Artificial Sequence
  Building block peptide "PEP"
VPAKT

SEQ ID NO: 13610 - protein, 5 aa, Artificial Sequence
  Building block peptide "PEP"
VPAQL

SEQ ID NO: 13611 - protein, 5 aa, Artificial Sequence
  Building block peptide "PEP"
VPARL

SEQ ID NO: 13612 - protein, 5 aa, Artificial Sequence
  Building block peptide "PEP"
VPEAL

SEQ ID NO: 13613 - protein, 5 aa, Artificial Sequence
  Building block peptide "PEP"
VPEDL

SEQ ID NO: 13614 - protein, 5 aa, Artificial Sequence
  Building block peptide "PEP"
VPEEL

SEQ ID NO: 13615 - protein, 5 aa, Artificial Sequence
  Building block peptide "PEP"
VPEKL

SEQ ID NO: 13616 - protein, 5 aa, Artificial Sequence
  Building block peptide "PEP"
VPEKM

SEQ ID NO: 13617 - protein, 5 aa, Artificial Sequence
  Building block peptide "PEP"
VPEKT

SEQ ID NO: 13618 - protein, 5 aa, Artificial Sequence
  Building block peptide "PEP"
VPEQL

SEQ ID NO: 13619 - protein, 5 aa, Artificial Sequence
  Building block peptide "PEP"
VPERL

SEQ ID NO: 13620 - protein, 5 aa, Artificial Sequence
  Building block peptide "PEP"
VPQAL

SEQ ID NO: 13621 - protein, 5 aa, Artificial Sequence
  Building block peptide "PEP"
VPQDL

SEQ ID NO: 13622 - protein, 5 aa, Artificial Sequence
  Building block peptide "PEP"
VPQEL

SEQ ID NO: 13623 - protein, 5 aa, Artificial Sequence
  Building block peptide "PEP"
VPQKL

SEQ ID NO: 13624 - protein, 5 aa, Artificial Sequence
  Building block peptide "PEP"
VPQKM

SEQ ID NO: 13625 - protein, 5 aa, Artificial Sequence
  Building block peptide "PEP"
VPQKT

SEQ ID NO: 13626 - protein, 5 aa, Artificial Sequence
  Building block peptide "PEP"
VPQQL

SEQ ID NO: 13627 - protein, 5 aa, Artificial Sequence
  Building block peptide "PEP"
VPQRL

SEQ ID NO: 13628 - protein, 5 aa, Artificial Sequence
  Building block peptide "PEP"
VPTAL

SEQ ID NO: 13629 - protein, 5 aa, Artificial Sequence
  Building block peptide "PEP"
VPTDL

SEQ ID NO: 13630 - protein, 5 aa, Artificial Sequence
  Building block peptide "PEP"
VPTEE

SEQ ID NO: 13631 - protein, 5 aa, Artificial Sequence
  Building block peptide "PEP"
VPTEL

SEQ ID NO: 13632 - protein, 5 aa, Artificial Sequence
  Building block peptide "PEP"
VPTGQ

SEQ ID NO: 13633 - protein, 5 aa, Artificial Sequence
  Building block peptide "PEP"
VPTKL

SEQ ID NO: 13634 - protein, 5 aa, Artificial Sequence
  Building block peptide "PEP"
VPTKM

SEQ ID NO: 13635 - protein, 5 aa, Artificial Sequence
  Building block peptide "PEP"
VPTKT

SEQ ID NO: 13636 - protein, 5 aa, Artificial Sequence
  Building block peptide "PEP"
VPTQL

SEQ ID NO: 13637 - protein, 5 aa, Artificial Sequence
  Building block peptide "PEP"
VPTRL

SEQ ID NO: 13638 - protein, 5 aa, Artificial Sequence
  Building block peptide "PEP"
VSQAL

SEQ ID NO: 13639 - protein, 5 aa, Artificial Sequence
  Building block peptide "PEP"
VSQDL

SEQ ID NO: 13640 - protein, 5 aa, Artificial Sequence
  Building block peptide "PEP"
VSQEL

SEQ ID NO: 13641 - protein, 5 aa, Artificial Sequence
  Building block peptide "PEP"
VSQKL

SEQ ID NO: 13642 - protein, 5 aa, Artificial Sequence
  Building block peptide "PEP"
VSQKM

SEQ ID NO: 13643 - protein, 5 aa, Artificial Sequence
  Building block peptide "PEP"
VSQKT

SEQ ID NO: 13644 - protein, 5 aa, Artificial Sequence
  Building block peptide "PEP"
VSQQL

SEQ ID NO: 13645 - protein, 5 aa, Artificial Sequence
  Building block peptide "PEP"
VSQRL

SEQ ID NO: 13646 - protein, 7 aa, Artificial Sequence
  Building block peptide "PEP"
  MOD_RES (6), (7): Xaa is C or S
AAPASXX

SEQ ID NO: 13647 - protein, 7 aa, Artificial Sequence
  Building block peptide "PEP"
  MOD_RES (6), (7): Xaa is C or S
ASAAPXX

SEQ ID NO: 13648 - protein, 7 aa, Artificial Sequence
  Building block peptide "PEP"
  MOD_RES (6), (7): Xaa is C or S
ASASPXX

SEQ ID NO: 13649 - protein, 7 aa, Artificial Sequence
  Building block peptide "PEP"
  MOD_RES (6), (7): Xaa is C or S
AVPKAXX

SEQ ID NO: 13650 - protein, 7 aa, Artificial Sequence
  Building block peptide "PEP"
  MOD_RES (6), (7): Xaa is C or S
GIPEPXX

SEQ ID NO: 13651 - protein, 7 aa, Artificial Sequence
  Building block peptide "PEP"
  MOD_RES (6), (7): Xaa is C or S
GSAGPXX

SEQ ID NO: 13652 - protein, 7 aa, Artificial Sequence
  Building block peptide "PEP"
  MOD_RES (6), (7): Xaa is C or S
HVPKPXX

SEQ ID NO: 13653 - protein, 7 aa, Artificial Sequence
  Building block peptide "PEP"
  MOD_RES (7), (7): Xaa is C or S
HVTKPTX

SEQ ID NO: 13654 - protein, 7 aa, Artificial Sequence
  Building block peptide "PEP"
  MOD_RES (6), (7): Xaa is C or S
KASKAXX

SEQ ID NO: 13655 - protein, 7 aa, Artificial Sequence
  Building block peptide "PEP"
  MOD_RES (6), (7): Xaa is C or S
KIPKAXX

SEQ ID NO: 13656 - protein, 7 aa, Artificial Sequence
  Building block peptide "PEP"
  MOD_RES (6), (7): Xaa is C or S
KVGKAXX

SEQ ID NO: 13657 - protein, 7 aa, Artificial Sequence
  Building block peptide "PEP"
  MOD_RES (7), (7): Xaa is C or S
NDEGLEX

SEQ ID NO: 13658 - protein, 7 aa, Artificial Sequence
  Building block peptide "PEP"
  MOD_RES (5), (5): Xaa is C or S
RNVQXRP

SEQ ID NO: 13659 - protein, 7 aa, Artificial Sequence
  Building block peptide "PEP"
  MOD_RES (6), (7): Xaa is C or S
RVPSTXX

SEQ ID NO: 13660 - protein, 7 aa, Artificial Sequence
  Building block peptide "PEP"
  MOD_RES (6), (7): Xaa is C or S
SIPKAXX

SEQ ID NO: 13661 - protein, 7 aa, Artificial Sequence
  Building block peptide "PEP"
  MOD_RES (5), (5): Xaa is C or S
SSVKXQP

SEQ ID NO: 13662 - protein, 7 aa, Artificial Sequence
  Building block peptide "PEP"
  MOD_RES (6), (7): Xaa is C or S
STPPTXX

SEQ ID NO: 13663 - protein, 7 aa, Artificial Sequence
  Building block peptide "PEP"
  MOD_RES (6), (7): Xaa is C or S
TVPKPXX

SEQ ID NO: 13664 - protein, 7 aa, Artificial Sequence
  Building block peptide "PEP"
  MOD_RES (6), (7): Xaa is C or S
YVPKPXX

SEQ ID NO: 13665 - protein, 12 aa, Artificial Sequence
  Building block peptide "PEP"
  MOD_RES (6), (7): Xaa is C or S
AAPASXXAPTRL

SEQ ID NO: 13666 - protein, 12 aa, Artificial Sequence
  Building block peptide "PEP"
  MOD_RES (6), (7): Xaa is C or S
AAPASXXAPVRL

SEQ ID NO: 13667 - protein, 12 aa, Artificial Sequence
  Building block peptide "PEP"
  MOD_RES (6), (7): Xaa is C or S
AAPASXXTPTRL

SEQ ID NO: 13668 - protein, 12 aa, Artificial Sequence
  Building block peptide "PEP"
  MOD_RES (6), (7): Xaa is C or S
AAPASXXVPARL

SEQ ID NO: 13669 - protein, 12 aa, Artificial Sequence
  Building block peptide "PEP"
  MOD_RES (6), (7): Xaa is C or S
AAPASXXVPERL

SEQ ID NO: 13670 - protein, 12 aa, Artificial Sequence
  Building block peptide "PEP"
  MOD_RES (6), (7): Xaa is C or S
AAPASXXVPQRL

SEQ ID NO: 13671 - protein, 12 aa, Artificial Sequence
  Building block peptide "PEP"
  MOD_RES (6), (7): Xaa is C or S
AAPASXXVPTRL

SEQ ID NO: 13672 - protein, 12 aa, Artificial Sequence
  Building block peptide "PEP"
  MOD_RES (6), (7): Xaa is C or S
AAPASXXVSQRL

SEQ ID NO: 13673 - protein, 12 aa, Artificial Sequence
  Building block peptide "PEP"
  MOD_RES (6), (7): Xaa is C or S
ASAAPXXAPTAL

SEQ ID NO: 13674 - protein, 12 aa, Artificial Sequence
  Building block peptide "PEP"
  MOD_RES (6), (7): Xaa is C or S
ASAAPXXAPVAL

SEQ ID NO: 13675 - protein, 12 aa, Artificial Sequence
  Building block peptide "PEP"
  MOD_RES (6), (7): Xaa is C or S
ASAAPXXTPTAL

SEQ ID NO: 13676 - protein, 12 aa, Artificial Sequence
  Building block peptide "PEP"
  MOD_RES (6), (7): Xaa is C or S
ASAAPXXVPAAL

SEQ ID NO: 13677 - protein, 12 aa, Artificial Sequence
  Building block peptide "PEP"
  MOD_RES (6), (7): Xaa is C or S
ASAAPXXVPEAL

SEQ ID NO: 13678 - protein, 12 aa, Artificial Sequence
  Building block peptide "PEP"
  MOD_RES (6), (7): Xaa is C or S
ASAAPXXVPQAL

SEQ ID NO: 13679 - protein, 12 aa, Artificial Sequence
  Building block peptide "PEP"
  MOD_RES (6), (7): Xaa is C or S
ASAAPXXVPTAL

SEQ ID NO: 13680 - protein, 12 aa, Artificial Sequence
  Building block peptide "PEP"
  MOD_RES (6), (7): Xaa is C or S
ASAAPXXVSQAL

SEQ ID NO: 13681 - protein, 12 aa, Artificial Sequence
  Building block peptide "PEP"
  MOD_RES (6), (7): Xaa is C or S
ASASPXXAPTDL

SEQ ID NO: 13682 - protein, 12 aa, Artificial Sequence
  Building block peptide "PEP"
  MOD_RES (6), (7): Xaa is C or S
ASASPXXAPVDL

SEQ ID NO: 13683 - protein, 12 aa, Artificial Sequence
  Building block peptide "PEP"
  MOD_RES (6), (7): Xaa is C or S
ASASPXXTPTDL

SEQ ID NO: 13684 - protein, 12 aa, Artificial Sequence
  Building block peptide "PEP"
  MOD_RES (6), (7): Xaa is C or S
ASASPXXVPADL

SEQ ID NO: 13685 - protein, 12 aa, Artificial Sequence
  Building block peptide "PEP"
  MOD_RES (6), (7): Xaa is C or S
ASASPXXVPEDL

SEQ ID NO: 13686 - protein, 12 aa, Artificial Sequence
  Building block peptide "PEP"
  MOD_RES (6), (7): Xaa is C or S
ASASPXXVPQDL

SEQ ID NO: 13687 - protein, 12 aa, Artificial Sequence
  Building block peptide "PEP"
  MOD_RES (6), (7): Xaa is C or S
ASASPXXVPTDL

SEQ ID NO: 13688 - protein, 12 aa, Artificial Sequence
  Building block peptide "PEP"
  MOD_RES (6), (7): Xaa is C or S
ASASPXXVSQDL

SEQ ID NO: 13689 - protein, 12 aa, Artificial Sequence
  Building block peptide "PEP"
  MOD_RES (6), (7): Xaa is C or S
AVPKAXXAPTKL

SEQ ID NO: 13690 - protein, 12 aa, Artificial Sequence
  Building block peptide "PEP"
  MOD_RES (6), (7): Xaa is C or S
AVPKAXXAPVKL

SEQ ID NO: 13691 - protein, 12 aa, Artificial Sequence
  Building block peptide "PEP"
  MOD_RES (6), (7): Xaa is C or S
AVPKAXXTPTKL

SEQ ID NO: 13692 - protein, 12 aa, Artificial Sequence
  Building block peptide "PEP"
  MOD_RES (6), (7): Xaa is C or S
AVPKAXXVPAKL

SEQ ID NO: 13693 - protein, 12 aa, Artificial Sequence
  Building block peptide "PEP"
  MOD_RES (6), (7): Xaa is C or S
AVPKAXXVPEKL

SEQ ID NO: 13694 - protein, 12 aa, Artificial Sequence
  Building block peptide "PEP"
  MOD_RES (6), (7): Xaa is C or S
AVPKAXXVPQKL

SEQ ID NO: 13695 - protein, 12 aa, Artificial Sequence
  Building block peptide "PEP"
  MOD_RES (6), (7): Xaa is C or S
AVPKAXXVPTKL

SEQ ID NO: 13696 - protein, 12 aa, Artificial Sequence
  Building block peptide "PEP"
  MOD_RES (6), (7): Xaa is C or S
AVPKAXXVSQKL

SEQ ID NO: 13697 - protein, 12 aa, Artificial Sequence
  Building block peptide "PEP"
  MOD_RES (6), (7): Xaa is C or S
GIPEPXXAPTKM

SEQ ID NO: 13698 - protein, 12 aa, Artificial Sequence
  Building block peptide "PEP"
  MOD_RES (6), (7): Xaa is C or S
GIPEPXXAPVKM

SEQ ID NO: 13699 - protein, 12 aa, Artificial Sequence
  Building block peptide "PEP"
  MOD_RES (6), (7): Xaa is C or S
GIPEPXXTPTKM

SEQ ID NO: 13700 - protein, 12 aa, Artificial Sequence
  Building block peptide "PEP"
  MOD_RES (6), (7): Xaa is C or S
GIPEPXXVPAKM

SEQ ID NO: 13701 - protein, 12 aa, Artificial Sequence
  Building block peptide "PEP"
  MOD_RES (6), (7): Xaa is C or S
GIPEPXXVPEKM

SEQ ID NO: 13702 - protein, 12 aa, Artificial Sequence
  Building block peptide "PEP"
  MOD_RES (6), (7): Xaa is C or S
GIPEPXXVPQKM

SEQ ID NO: 13703 - protein, 12 aa, Artificial Sequence
  Building block peptide "PEP"
  MOD_RES (6), (7): Xaa is C or S
GIPEPXXVPTKM

SEQ ID NO: 13704 - protein, 12 aa, Artificial Sequence
  Building block peptide "PEP"
  MOD_RES (6), (7): Xaa is C or S
GIPEPXXVSQKM

SEQ ID NO: 13705 - protein, 12 aa, Artificial Sequence
  Building block peptide "PEP"
  MOD_RES (6), (7): Xaa is C or S
GSAGPXXAPTKM

SEQ ID NO: 13706 - protein, 12 aa, Artificial Sequence
  Building block peptide "PEP"
  MOD_RES (6), (7): Xaa is C or S
GSAGPXXAPVKM

SEQ ID NO: 13707 - protein, 12 aa, Artificial Sequence
  Building block peptide "PEP"
  MOD_RES (6), (7): Xaa is C or S
GSAGPXXTPTKM

SEQ ID NO: 13708 - protein, 12 aa, Artificial Sequence
  Building block peptide "PEP"
  MOD_RES (6), (7): Xaa is C or S
GSAGPXXVPAKM

SEQ ID NO: 13709 - protein, 12 aa, Artificial Sequence
  Building block peptide "PEP"
  MOD_RES (6), (7): Xaa is C or S
GSAGPXXVPEKM

SEQ ID NO: 13710 - protein, 12 aa, Artificial Sequence
  Building block peptide "PEP"
  MOD_RES (6), (7): Xaa is C or S
GSAGPXXVPQKM

SEQ ID NO: 13711 - protein, 12 aa, Artificial Sequence
  Building block peptide "PEP"
  MOD_RES (6), (7): Xaa is C or S
GSAGPXXVPTKM

SEQ ID NO: 13712 - protein, 12 aa, Artificial Sequence
  Building block peptide "PEP"
  MOD_RES (6), (7): Xaa is C or S
GSAGPXXVSQKM

SEQ ID NO: 13713 - protein, 12 aa, Artificial Sequence
  Building block peptide "PEP"
  MOD_RES (6), (7): Xaa is C or S
HVPKPXXAPTKL

SEQ ID NO: 13714 - protein, 12 aa, Artificial Sequence
  Building block peptide "PEP"
  MOD_RES (6), (7): Xaa is C or S
HVPKPXXAPVKL

SEQ ID NO: 13715 - protein, 12 aa, Artificial Sequence
  Building block peptide "PEP"
  MOD_RES (6), (7): Xaa is C or S
HVPKPXXTPTKL

SEQ ID NO: 13716 - protein, 12 aa, Artificial Sequence
  Building block peptide "PEP"
  MOD_RES (6), (7): Xaa is C or S
HVPKPXXVPAKL

SEQ ID NO: 13717 - protein, 12 aa, Artificial Sequence
  Building block peptide "PEP"
  MOD_RES (6), (7): Xaa is C or S
HVPKPXXVPEKL

SEQ ID NO: 13718 - protein, 12 aa, Artificial Sequence
  Building block peptide "PEP"
  MOD_RES (6), (7): Xaa is C or S
HVPKPXXVPQKL

SEQ ID NO: 13719 - protein, 12 aa, Artificial Sequence
  Building block peptide "PEP"
  MOD_RES (6), (7): Xaa is C or S
HVPKPXXVPTKL

SEQ ID NO: 13720 - protein, 12 aa, Artificial Sequence
  Building block peptide "PEP"
  MOD_RES (6), (7): Xaa is C or S
HVPKPXXVSQKL

SEQ ID NO: 13721 - protein, 12 aa, Artificial Sequence
  Building block peptide "PEP"
  MOD_RES (7), (7): Xaa is C or S
HVTKPTXAPTKL

SEQ ID NO: 13722 - protein, 12 aa, Artificial Sequence
  Building block peptide "PEP"
  MOD_RES (7), (7): Xaa is C or S
HVTKPTXAPVKL

SEQ ID NO: 13723 - protein, 12 aa, Artificial Sequence
  Building block peptide "PEP"
  MOD_RES (7), (7): Xaa is C or S
HVTKPTXSRVKL

SEQ ID NO: 13724 - protein, 12 aa, Artificial Sequence
  Building block peptide "PEP"
  MOD_RES (7), (7): Xaa is C or S
HVTKPTXTPTKL

SEQ ID NO: 13725 - protein, 12 aa, Artificial Sequence
  Building block peptide "PEP"
  MOD_RES (7), (7): Xaa is C or S
HVTKPTXTQVKL

SEQ ID NO: 13726 - protein, 12 aa, Artificial Sequence
  Building block peptide "PEP"
  MOD_RES (7), (7): Xaa is C or S
HVTKPTXVPAKL

SEQ ID NO: 13727 - protein, 12 aa, Artificial Sequence
  Building block peptide "PEP"
  MOD_RES (7), (7): Xaa is C or S
HVTKPTXVPEKL

SEQ ID NO: 13728 - protein, 12 aa, Artificial Sequence
  Building block peptide "PEP"
  MOD_RES (7), (7): Xaa is C or S
HVTKPTXVPQKL

SEQ ID NO: 13729 - protein, 12 aa, Artificial Sequence
  Building block peptide "PEP"
  MOD_RES (7), (7): Xaa is C or S
HVTKPTXVPTKL

SEQ ID NO: 13730 - protein, 12 aa, Artificial Sequence
  Building block peptide "PEP"
  MOD_RES (7), (7): Xaa is C or S
HVTKPTXVSQKL

SEQ ID NO: 13731 - protein, 12 aa, Artificial Sequence
  Building block peptide "PEP"
  MOD_RES (6), (7): Xaa is C or S
KASKAXXAPTKL

SEQ ID NO: 13732 - protein, 12 aa, Artificial Sequence
  Building block peptide "PEP"
  MOD_RES (6), (7): Xaa is C or S
KASKAXXAPVKL

SEQ ID NO: 13733 - protein, 12 aa, Artificial Sequence
  Building block peptide "PEP"
  MOD_RES (6), (7): Xaa is C or S
KASKAXXTPTKL

SEQ ID NO: 13734 - protein, 12 aa, Artificial Sequence
  Building block peptide "PEP"
  MOD_RES (6), (7): Xaa is C or S
KASKAXXVPAKL

SEQ ID NO: 13735 - protein, 12 aa, Artificial Sequence
  Building block peptide "PEP"
  MOD_RES (6), (7): Xaa is C or S
KASKAXXVPEKL

SEQ ID NO: 13736 - protein, 12 aa, Artificial Sequence
  Building block peptide "PEP"
  MOD_RES (6), (7): Xaa is C or S
KASKAXXVPQKL

SEQ ID NO: 13737 - protein, 12 aa, Artificial Sequence
  Building block peptide "PEP"
  MOD_RES (6), (7): Xaa is C or S
KASKAXXVPTKL

SEQ ID NO: 13738 - protein, 12 aa, Artificial Sequence
  Building block peptide "PEP"
  MOD_RES (6), (7): Xaa is C or S
KASKAXXVSQKL

SEQ ID NO: 13739 - protein, 12 aa, Artificial Sequence
  Building block peptide "PEP"
  MOD_RES (6), (7): Xaa is C or S
KIPKAXXAPTEL

SEQ ID NO: 13740 - protein, 12 aa, Artificial Sequence
  Building block peptide "PEP"
  MOD_RES (6), (7): Xaa is C or S
KIPKAXXAPVEL

SEQ ID NO: 13741 - protein, 12 aa, Artificial Sequence
  Building block peptide "PEP"
  MOD_RES (6), (7): Xaa is C or S
KIPKAXXTPTEL

SEQ ID NO: 13742 - protein, 12 aa, Artificial Sequence
  Building block peptide "PEP"
  MOD_RES (6), (7): Xaa is C or S
KIPKAXXVPAEL

SEQ ID NO: 13743 - protein, 12 aa, Artificial Sequence
  Building block peptide "PEP"
  MOD_RES (6), (7): Xaa is C or S
KIPKAXXVPEEL

SEQ ID NO: 13744 - protein, 12 aa, Artificial Sequence
  Building block peptide "PEP"
  MOD_RES (6), (7): Xaa is C or S
KIPKAXXVPQEL

SEQ ID NO: 13745 - protein, 12 aa, Artificial Sequence
  Building block peptide "PEP"
  MOD_RES (6), (7): Xaa is C or S
KIPKAXXVPTEL

SEQ ID NO: 13746 - protein, 12 aa, Artificial Sequence
  Building block peptide "PEP"
  MOD_RES (6), (7): Xaa is C or S
KIPKAXXVSQEL

SEQ ID NO: 13747 - protein, 12 aa, Artificial Sequence
  Building block peptide "PEP"
  MOD_RES (6), (7): Xaa is C or S
KVGKAXXAPTKL

SEQ ID NO: 13748 - protein, 12 aa, Artificial Sequence
  Building block peptide "PEP"
  MOD_RES (6), (7): Xaa is C or S
KVGKAXXAPVKL

SEQ ID NO: 13749 - protein, 12 aa, Artificial Sequence
  Building block peptide "PEP"
  MOD_RES (6), (7): Xaa is C or S
KVGKAXXTPTKL

SEQ ID NO: 13750 - protein, 12 aa, Artificial Sequence
  Building block peptide "PEP"
  MOD_RES (6), (7): Xaa is C or S
KVGKAXXVPAKL

SEQ ID NO: 13751 - protein, 12 aa, Artificial Sequence
  Building block peptide "PEP"
  MOD_RES (6), (7): Xaa is C or S
KVGKAXXVPEKL

SEQ ID NO: 13752 - protein, 12 aa, Artificial Sequence
  Building block peptide "PEP"
  MOD_RES (6), (7): Xaa is C or S
KVGKAXXVPQKL

SEQ ID NO: 13753 - protein, 12 aa, Artificial Sequence
  Building block peptide "PEP"
  MOD_RES (6), (7): Xaa is C or S
KVGKAXXVPTKL

SEQ ID NO: 13754 - protein, 12 aa, Artificial Sequence
  Building block peptide "PEP"
  MOD_RES (6), (7): Xaa is C or S
KVGKAXXVSQKL

SEQ ID NO: 13755 - protein, 12 aa, Artificial Sequence
  Building block peptide "PEP"
  MOD_RES (7), (7): Xaa is C or S
NDEGLEXVPTEE

SEQ ID NO: 13756 - protein, 12 aa, Artificial Sequence
  Building block peptide "PEP"
  MOD_RES (7), (7): Xaa is C or S
NDEGLEXVPTGQ

SEQ ID NO: 13757 - protein, 12 aa, Artificial Sequence
  Building block peptide "PEP"
  MOD_RES (5), (5): Xaa is C or S
RNVQXRPSRVQL

SEQ ID NO: 13758 - protein, 12 aa, Artificial Sequence
  Building block peptide "PEP"
  MOD_RES (5), (5): Xaa is C or S
RNVQXRPTQVQL

SEQ ID NO: 13759 - protein, 12 aa, Artificial Sequence
  Building block peptide "PEP"
  MOD_RES (6), (7): Xaa is C or S
RVPSTXXAPTKT

SEQ ID NO: 13760 - protein, 12 aa, Artificial Sequence
  Building block peptide "PEP"
  MOD_RES (6), (7): Xaa is C or S
RVPSTXXAPVKT

SEQ ID NO: 13761 - protein, 12 aa, Artificial Sequence
  Building block peptide "PEP"
  MOD_RES (6), (7): Xaa is C or S
RVPSTXXTPTKT

SEQ ID NO: 13762 - protein, 12 aa, Artificial Sequence
  Building block peptide "PEP"
  MOD_RES (6), (7): Xaa is C or S
RVPSTXXVPAKT

SEQ ID NO: 13763 - protein, 12 aa, Artificial Sequence
  Building block peptide "PEP"
  MOD_RES (6), (7): Xaa is C or S
RVPSTXXVPEKT

SEQ ID NO: 13764 - protein, 12 aa, Artificial Sequence
  Building block peptide "PEP"
  MOD_RES (6), (7): Xaa is C or S
RVPSTXXVPQKT

SEQ ID NO: 13765 - protein, 12 aa, Artificial Sequence
  Building block peptide "PEP"
  MOD_RES (6), (7): Xaa is C or S
RVPSTXXVPTKT

SEQ ID NO: 13766 - protein, 12 aa, Artificial Sequence
  Building block peptide "PEP"
  MOD_RES (6), (7): Xaa is C or S
RVPSTXXVSQKT

SEQ ID NO: 13767 - protein, 12 aa, Artificial Sequence
  Building block peptide "PEP"
  MOD_RES (6), (7): Xaa is C or S
SIPKAXXAPTEL

SEQ ID NO: 13768 - protein, 12 aa, Artificial Sequence
  Building block peptide "PEP"
  MOD_RES (6), (7): Xaa is C or S
SIPKAXXAPVEL

SEQ ID NO: 13769 - protein, 12 aa, Artificial Sequence
  Building block peptide "PEP"
  MOD_RES (6), (7): Xaa is C or S
SIPKAXXTPTEL

SEQ ID NO: 13770 - protein, 12 aa, Artificial Sequence
  Building block peptide "PEP"
  MOD_RES (6), (7): Xaa is C or S
SIPKAXXVPAEL

SEQ ID NO: 13771 - protein, 12 aa, Artificial Sequence
  Building block peptide "PEP"
  MOD_RES (6), (7): Xaa is C or S
SIPKAXXVPEEL

SEQ ID NO: 13772 - protein, 12 aa, Artificial Sequence
  Building block peptide "PEP"
  MOD_RES (6), (7): Xaa is C or S
SIPKAXXVPQEL

SEQ ID NO: 13773 - protein, 12 aa, Artificial Sequence
  Building block peptide "PEP"
  MOD_RES (6), (7): Xaa is C or S
SIPKAXXVPTEL

SEQ ID NO: 13774 - protein, 12 aa, Artificial Sequence
  Building block peptide "PEP"
  MOD_RES (6), (7): Xaa is C or S
SIPKAXXVSQEL

SEQ ID NO: 13775 - protein, 12 aa, Artificial Sequence
  Building block peptide "PEP"
  MOD_RES (5), (5): Xaa is C or S
SSVKXQPSRVHH

SEQ ID NO: 13776 - protein, 12 aa, Artificial Sequence
  Building block peptide "PEP"
  MOD_RES (5), (5): Xaa is C or S
SSVKXQPTQVHH

SEQ ID NO: 13777 - protein, 12 aa, Artificial Sequence
  Building block peptide "PEP"
  MOD_RES (6), (7): Xaa is C or S
STPPTXXAPTRL

SEQ ID NO: 13778 - protein, 12 aa, Artificial Sequence
  Building block peptide "PEP"
  MOD_RES (6), (7): Xaa is C or S
STPPTXXAPVRL

SEQ ID NO: 13779 - protein, 12 aa, Artificial Sequence
  Building block peptide "PEP"
  MOD_RES (6), (7): Xaa is C or S
STPPTXXTPTRL

SEQ ID NO: 13780 - protein, 12 aa, Artificial Sequence
  Building block peptide "PEP"
  MOD_RES (6), (7): Xaa is C or S
STPPTXXVPARL

SEQ ID NO: 13781 - protein, 12 aa, Artificial Sequence
  Building block peptide "PEP"
  MOD_RES (6), (7): Xaa is C or S
STPPTXXVPERL

SEQ ID NO: 13782 - protein, 12 aa, Artificial Sequence
  Building block peptide "PEP"
  MOD_RES (6), (7): Xaa is C or S
STPPTXXVPQRL

SEQ ID NO: 13783 - protein, 12 aa, Artificial Sequence
  Building block peptide "PEP"
  MOD_RES (6), (7): Xaa is C or S
STPPTXXVPTRL

SEQ ID NO: 13784 - protein, 12 aa, Artificial Sequence
  Building block peptide "PEP"
  MOD_RES (6), (7): Xaa is C or S
STPPTXXVSQRL

SEQ ID NO: 13785 - protein, 12 aa, Artificial Sequence
  Building block peptide "PEP"
  MOD_RES (6), (7): Xaa is C or S
TVPKPXXAPTQL

SEQ ID NO: 13786 - protein, 12 aa, Artificial Sequence
  Building block peptide "PEP"
  MOD_RES (6), (7): Xaa is C or S
TVPKPXXAPVQL

SEQ ID NO: 13787 - protein, 12 aa, Artificial Sequence
  Building block peptide "PEP"
  MOD_RES (6), (7): Xaa is C or S
TVPKPXXTPTQL

SEQ ID NO: 13788 - protein, 12 aa, Artificial Sequence
  Building block peptide "PEP"
  MOD_RES (6), (7): Xaa is C or S
TVPKPXXVPAQL

SEQ ID NO: 13789 - protein, 12 aa, Artificial Sequence
  Building block peptide "PEP"
  MOD_RES (6), (7): Xaa is C or S
TVPKPXXVPEQL

SEQ ID NO: 13790 - protein, 12 aa, Artificial Sequence
  Building block peptide "PEP"
  MOD_RES (6), (7): Xaa is C or S
TVPKPXXVPQQL

SEQ ID NO: 13791 - protein, 12 aa, Artificial Sequence
  Building block peptide "PEP"
  MOD_RES (6), (7): Xaa is C or S
TVPKPXXVPTQL

SEQ ID NO: 13792 - protein, 12 aa, Artificial Sequence
  Building block peptide "PEP"
  MOD_RES (6), (7): Xaa is C or S
TVPKPXXVSQQL

SEQ ID NO: 13793 - protein, 12 aa, Artificial Sequence
  Building block peptide "PEP"
  MOD_RES (6), (7): Xaa is C or S
YVPKPXXAPTKL

SEQ ID NO: 13794 - protein, 12 aa, Artificial Sequence
  Building block peptide "PEP"
  MOD_RES (6), (7): Xaa is C or S
YVPKPXXAPVKL

SEQ ID NO: 13795 - protein, 12 aa, Artificial Sequence
  Building block peptide "PEP"
  MOD_RES (6), (7): Xaa is C or S
YVPKPXXTPTKL

SEQ ID NO: 13796 - protein, 12 aa, Artificial Sequence
  Building block peptide "PEP"
  MOD_RES (6), (7): Xaa is C or S
YVPKPXXVPAKL

SEQ ID NO: 13797 - protein, 12 aa, Artificial Sequence
  Building block peptide "PEP"
  MOD_RES (6), (7): Xaa is C or S
YVPKPXXVPEKL

SEQ ID NO: 13798 - protein, 12 aa, Artificial Sequence
  Building block peptide "PEP"
  MOD_RES (6), (7): Xaa is C or S
YVPKPXXVPQKL

SEQ ID NO: 13799 - protein, 12 aa, Artificial Sequence
  Building block peptide "PEP"
  MOD_RES (6), (7): Xaa is C or S
YVPKPXXVPTKL

SEQ ID NO: 13800 - protein, 12 aa, Artificial Sequence
  Building block peptide "PEP"
  MOD_RES (6), (7): Xaa is C or S
YVPKPXXVSQKL

SEQ ID NO: 13801 - protein, 8 aa, Artificial Sequence
  Building block peptide "PEP"
  MOD_RES (5), (5): Xaa is G, A, V, L, I, P, F, M, W, T or S
EPISXLYL

SEQ ID NO: 13802 - protein, 8 aa, Artificial Sequence
  Building block peptide "PEP"
  MOD_RES (5), (5): Xaa is G, A, V, L, I, P, F, M, W, T or S
EPLPXVYY

SEQ ID NO: 13803 - protein, 8 aa, Artificial Sequence
  Building block peptide "PEP"
  MOD_RES (5), (5): Xaa is G, A, V, L, I, P, F, M, W, T or S
EPLTXLYY

SEQ ID NO: 13804 - protein, 8 aa, Artificial Sequence
  Building block peptide "PEP"
  MOD_RES (5), (5): Xaa is G, A, V, L, I, P, F, M, W, T or S
KPLSXLYV

SEQ ID NO: 13805 - protein, 8 aa, Artificial Sequence
  Building block peptide "PEP"
  MOD_RES (5), (5): Xaa is G, A, V, L, I, P, F, M, W, T or S
NAISXLYF

SEQ ID NO: 13806 - protein, 8 aa, Artificial Sequence
  Building block peptide "PEP"
  MOD_RES (5), (5): Xaa is G, A, V, L, I, P, F, M, W, T or S
RPVQXRKI

SEQ ID NO: 13807 - protein, 8 aa, Artificial Sequence
  Building block peptide "PEP"
  MOD_RES (5), (5): Xaa is G, A, V, L, I, P, F, M, W, T or S
RSVKXAKV

SEQ ID NO: 13808 - protein, 8 aa, Artificial Sequence
  Building block peptide "PEP"
  MOD_RES (5), (5): Xaa is G, A, V, L, I, P, F, M, W, T or S
SAISXLYL

SEQ ID NO: 13809 - protein, 8 aa, Artificial Sequence
  Building block peptide "PEP"
  MOD_RES (5), (5): Xaa is G, A, V, L, I, P, F, M, W, T or S
SATSXLYY

SEQ ID NO: 13810 - protein, 8 aa, Artificial Sequence
  Building block peptide "PEP"
  MOD_RES (5), (5): Xaa is G, A, V, L, I, P, F, M, W, T or S
SNITXQIM

SEQ ID NO: 13811 - protein, 8 aa, Artificial Sequence
  Building block peptide "PEP"
  MOD_RES (5), (5): Xaa is G, A, V, L, I, P, F, M, W, T or S
SPINXLYF

SEQ ID NO: 13812 - protein, 8 aa, Artificial Sequence
  Building block peptide "PEP"
  MOD_RES (5), (5): Xaa is G, A, V, L, I, P, F, M, W, T or S
SPISXLFI

SEQ ID NO: 13813 - protein, 8 aa, Artificial Sequence
  Building block peptide "PEP"
  MOD_RES (5), (5): Xaa is G, A, V, L, I, P, F, M, W, T or S
SPISXLYI

SEQ ID NO: 13814 - protein, 8 aa, Artificial Sequence
  Building block peptide "PEP"
  MOD_RES (5), (5): Xaa is G, A, V, L, I, P, F, M, W, T or S
SPISXLYK

SEQ ID NO: 13815 - protein, 8 aa, Artificial Sequence
  Building block peptide "PEP"
  MOD_RES (5), (5): Xaa is G, A, V, L, I, P, F, M, W, T or S
SSLSXLFF

SEQ ID NO: 13816 - protein, 7 aa, Artificial Sequence
  Building block peptide "PEP"
  MOD_RES (1), (1): Xaa is absent or any amino acid
  MOD_RES (2), (2): Xaa is absent or any amino acid
  MOD_RES (3), (3): Xaa is absent or any amino acid
  MOD_RES (4), (4): Xaa is absent or any amino acid
  MOD_RES (5), (5): Xaa is absent or any amino acid
  MOD_RES (6), (6): Xaa is absent or S, T, C, E, Q, P or R
  MOD_RES (7), (7): Xaa is absent or S, T, C, E, Q, P or R, and at least one Xaa is not absent
XXXXXXX

SEQ ID NO: 13817 - protein, 4 aa, Artificial Sequence
  Building block peptide "PEP"
SIAN

SEQ ID NO: 13818 - protein, 4 aa, Artificial Sequence
  Building block peptide "PEP"
SIAS

SEQ ID NO: 13819 - protein, 4 aa, Artificial Sequence
  Building block peptide "PEP"
NIPS

SEQ ID NO: 13820 - protein, 5 aa, Artificial Sequence
  Building block peptide "PEP"
  MOD_RES (2), (4): Xaa is C or S
GXGXR

SEQ ID NO: 13821 - protein, 5 aa, Artificial Sequence
  Building block peptide "PEP"
  MOD_RES (2), (4): Xaa is C or S
SXAXR

SEQ ID NO: 13822 - protein, 5 aa, Artificial Sequence
  Building block peptide "PEP"
  MOD_RES (2), (4): Xaa is C or S
SXGXH

SEQ ID NO: 13823 - protein, 5 aa, Artificial Sequence
  Building block peptide "PEP"
  MOD_RES (2), (4): Xaa is C or S
AXGXH

SEQ ID NO: 13824 - protein, 4 aa, Artificial Sequence
  Building block peptide "PEP"
  MOD_RES (1), (3): Xaa is C or S
XGXR

SEQ ID NO: 13825 - protein, 5 aa, Artificial Sequence
  Building block peptide "PEP"
  MOD_RES (2), (4): Xaa is C or S
EXGXR

SEQ ID NO: 13826 - protein, 5 aa, Artificial Sequence
  Building block peptide "PEP"
  MOD_RES (2), (4): Xaa is C or S
RXGXS

SEQ ID NO: 13827 - protein, 5 aa, Artificial Sequence
  Building block peptide "PEP"
  MOD_RES (2), (4): Xaa is C or S
AXGXR

SEQ ID NO: 13828 - protein, 5 aa, Artificial Sequence
  Building block peptide "PEP"
  MOD_RES (2), (4): Xaa is C or S
SXGXR

SEQ ID NO: 13829 - protein, 4 aa, Artificial Sequence
  Building block peptide "PEP"
  MOD_RES (1), (3): Xaa is C or S
XGXL

SEQ ID NO: 13830 - protein, 4 aa, Artificial Sequence
  Building block peptide "PEP"
  MOD_RES (1), (3): Xaa is C or S
XKXS

SEQ ID NO: 13831 - protein, 5 aa, Artificial Sequence
  Building block peptide "PEP"
  MOD_RES (2), (4): Xaa is C or S
KXEXR

SEQ ID NO: 13832 - protein, 5 aa, Artificial Sequence
  Building block peptide "PEP"
  MOD_RES (2), (4): Xaa is C or S
QXEXR

SEQ ID NO: 13833 - protein, 6 aa, Artificial Sequence
  Building block peptide "PEP"
  MOD_RES (3), (5): Xaa is C or S
LEXAXA

SEQ ID NO: 13834 - protein, 6 aa, Artificial Sequence
  Building block peptide "PEP"
  MOD_RES (3), (5): Xaa is C or S
LAXKXE

SEQ ID NO: 13835 - protein, 9 aa, Artificial Sequence
  Example of LINKER
AAAAAAAAA

SEQ ID NO: 13836 - protein, 7 aa, Artificial Sequence
  Example of LINKER
AAAAAAA

SEQ ID NO: 13837 - protein, 5 aa, Artificial Sequence
  Example of LINKER
AAAAA

SEQ ID NO: 13838 - protein, 9 aa, Artificial Sequence
  Example of LINKER
GGGGGGGGG

SEQ ID NO: 13839 - protein, 7 aa, Artificial Sequence
  Example of LINKER
GGGGGGG

SEQ ID NO: 13840 - protein, 5 aa, Artificial Sequence
  Example of LINKER
GGGGG

SEQ ID NO: 13841 - protein, 7 aa, Artificial Sequence
  Example of LINKER
DENEKVV

SEQ ID NO: 13842 - protein, 7 aa, Artificial Sequence
  Example of LINKER
DENKNVV

SEQ ID NO: 13843 - protein, 7 aa, Artificial Sequence
  Example of LINKER
DEYDKVV

SEQ ID NO: 13844 - protein, 7 aa, Artificial Sequence
  Example of LINKER
DDSSNVI

SEQ ID NO: 13845 - protein, 7 aa, Artificial Sequence
  Example of LINKER
DSSNNVI

SEQ ID NO: 13846 - protein, 7 aa, Artificial Sequence
  Example of LINKER
DDMGVPT

SEQ ID NO: 13847 - protein, 7 aa, Artificial Sequence
  Example of LINKER
DKGVVTY

SEQ ID NO: 13848 - protein, 7 aa, Artificial Sequence
  Example of LINKER
NDKQQII

SEQ ID NO: 13849 - protein, 7 aa, Artificial Sequence
  Example of LINKER
DAANNVV

SEQ ID NO: 13850 - protein, 7 aa, Artificial Sequence
  Example of LINKER
DSANNVV

SEQ ID NO: 13851 - protein, 7 aa, Artificial Sequence
  Example of LINKER
DDSSNVI

SEQ ID NO: 13852 - protein, 7 aa, Artificial Sequence
  Example of LINKER
DNGRVLL

SEQ ID NO: 13853 - protein, 7 aa, Artificial Sequence
  Example of LINKER
VGRKPKV

SEQ ID NO: 13854 - protein, 7 aa, Artificial Sequence
  Example of LINKER
IGKTPKI

SEQ ID NO: 13855 - protein, 7 aa, Artificial Sequence
  Example of LINKER
VGRTPKV

SEQ ID NO: 13856 - protein, 9 aa, Artificial Sequence
  Example of LINKER
RIKPHQGQH

SEQ ID NO: 13857 - protein, 9 aa, Artificial Sequence
  Example of LINKER
EYVRKKPKL

SEQ ID NO: 13858 - protein, 9 aa, Artificial Sequence
  Example of LINKER
EIVRKKPIF

SEQ ID NO: 13859 - protein, 7 aa, Artificial Sequence
  Example of LINKER
EYVRKKP

SEQ ID NO: 13860 - protein, 7 aa, Artificial Sequence
  Example of LINKER
EIVRKKP

SEQ ID NO: 13861 - protein, 20 aa, Artificial Sequence
  Examplary primary structure supporting PEPREF 3D coordinates
KIPKACCVPTELSAISMLYL

SEQ ID NO: 13862 - DNA, 18 bp, Artificial Sequence
  PCR Primer
ccgtccatgcggaagatc

SEQ ID NO: 13863 - DNA, 20 bp, Artificial Sequence
  PCR Primer
gaagacctcctcctcgcact

SEQ ID NO: 13864 - DNA, 21 bp, Artificial Sequence
  PCR Primer
catccaaccgtacatgcgcag

SEQ ID NO: 13865 - DNA, 21 bp, Artificial Sequence
  PCR Primer
catggccagaggaaagacctc

SEQ ID NO: 13866 - DNA, 20 bp, Artificial Sequence
  PCR Primer
tgatttcctggccttcattc

SEQ ID NO: 13867 - DNA, 20 bp, Artificial Sequence
  PCR Primer
cgggtacatggcaaaggtat

SEQ ID NO: 13868 - DNA, 20 bp, Artificial Sequence
  PCR Primer
aattccagtgcctccaacac

SEQ ID NO: 13869 - DNA, 20 bp, Artificial Sequence
  PCR Primer
gagctcatgacggtaggtga

SEQ ID NO: 13870 - DNA, 20 bp, Artificial Sequence
  PCR Primer
gccaagcagtgcacagataa

SEQ ID NO: 13871 - DNA, 21 bp, Artificial Sequence
  PCR Primer
ttcctttctggtgtgtgaagc

SEQ ID NO: 13872 - DNA, 22 bp, Artificial Sequence
  PCR Primer
agcatcctgctcatgttccttt

SEQ ID NO: 13873 - DNA, 21 bp, Artificial Sequence
  PCR Primer
gagccaaatgacccttccatt

SEQ ID NO: 13874 - DNA, 28 bp, Artificial Sequence
  PCR Primer
cttagttttctcagtctgtggttgaaat

SEQ ID NO: 13875 - DNA, 18 bp, Artificial Sequence
  PCR Primer
agagtaccccgagcctcc

SEQ ID NO: 13876 - DNA, 23 bp, Artificial Sequence
  PCR Primer
ctcagccttttgctcatctcact

SEQ ID NO: 13877 - DNA, 25 bp, Artificial Sequence
  PCR Primer
ccaagaggacagactcactttatgg

SEQ ID NO: 13878 - DNA, 21 bp, Artificial Sequence
  PCR Primer
agaagggctccatgtctgaca

SEQ ID NO: 13879 - DNA, 21 bp, Artificial Sequence
  PCR Primer
aagatttcaggacccgagcag

SEQ ID NO: 13880 - DNA, 19 bp, Artificial Sequence
  PCR Primer
aggcctcttgcaatgcgga

SEQ ID NO: 13881 - DNA, 19 bp, Artificial Sequence
  PCR Primer
ctggtggtggcgttgctgg

SEQ ID NO: 13882 - DNA, 20 bp, Artificial Sequence
  PCR Primer
gaccacagctgaacgtgaga

SEQ ID NO: 13883 - DNA, 20 bp, Artificial Sequence
  PCR Primer
catagcacgatggtcgattg

SEQ ID NO: 13884 - DNA, 18 bp, Artificial Sequence
  PCR Primer
gacttccgcgacgtggac

SEQ ID NO: 13885 - DNA, 18 bp, Artificial Sequence
  PCR Primer
gttgggcggcaggtactg

SEQ ID NO: 13886 - DNA, 18 bp, Artificial Sequence
  PCR Primer
tgccttgagcctgcttcc

SEQ ID NO: 13887 - DNA, 26 bp, Artificial Sequence
  PCR Primer
gcaaaattaaagcagtcttcattttg

SEQ ID NO: 13888 - DNA, 22 bp, Artificial Sequence
  PCR Primer
cctggtcttgaaaggtgataag

SEQ ID NO: 13889 - DNA, 19 bp, Artificial Sequence
  PCR Primer
cccgctatcccttgatctc

SEQ ID NO: 13890 - DNA, 24 bp, Artificial Sequence
  PCR Primer
tgtccaaatcgatgtggatgtttc

SEQ ID NO: 13891 - DNA, 23 bp, Artificial Sequence
  PCR Primer
ttgtaccattcttctgcctcctg

SEQ ID NO: 13892 - DNA, 26 bp, Artificial Sequence
  PCR Primer
aatctcttctagagactgggaaggag

SEQ ID NO: 13893 - DNA, 24 bp, Artificial Sequence
  PCR Primer
agctgattgactaaagtagctgga

SEQ ID NO: 13894 - DNA, 19 bp, Artificial Sequence
  PCR Primer
ccgaccgaatgcagaagga

SEQ ID NO: 13895 - DNA, 21 bp, Artificial Sequence
  PCR Primer
acagagtatttgcgctccgaa

SEQ ID NO: 13896 - DNA, 20 bp, Artificial Sequence
  PCR Primer
gcagtacagccccaaaatgg

SEQ ID NO: 13897 - DNA, 22 bp, Artificial Sequence
  PCR Primer
acaaagtccggcctgtatccaa
